(19) United States
(12) Patent Application Publication
(10) Pub. No.: US 2021/0213066 A1
(43) Pub. Date: Jul. 15, 2021

(54) IMPROVED CELL THERAPY COMPOSITIONS FOR HEMATOPOIETIC STEM CELL TRANSPLANT PATIENTS

(71) Applicant: CHILDREN'S NATIONAL MEDICAL CENTER, Washington, DC (US)

(72) Inventors: Catherine Mary Bollard, Bethesda, MD (US); Conrad Russell Y. Cruz, Bethesda, MD (US); Patrick Hanley, Washington, DC (US)

(73) Assignee: CHILDREN'S NATIONAL MEDICAL CENTER, Washington, DC (US)

(21) Appl. No.: 17/056,749

(22) PCT Filed: May 20, 2019
(86) PCT No.: PCT/US19/33186

§ 371 Date: Nov. 18, 2020

Related U.S. Application Data
(60) Provisional application No. 62/673,756, filed on May 18, 2018.

(51) Int. Cl. A61K 35/28; A61K 39/00; A61K 39/12; C12N 5/0783; C12N 5/0775

(52) U.S. Cl. CPC A61K 35/28; A61K 39/001149; A61K 39/12; C12N 5/0638; C12N 5/0663; A61K 39/001186; A61K 39/001153; A61K 39/00116; A61K 39/001184; A61K 39/001189; A61K 39/001188; A61K 39/00115

(57) ABSTRACT

The present disclosure provides for isolated and processed cell therapeutic compositions and Methods of using those compositions for the treatment of a patient undergoing a hematopoietic stem cell transplant (HSCT). In some embodiments, the disclosure provides for methods of making these cells by exposing the isolated T cell populations to one or more tumor antigens.

### RELATED APPLICATIONS

[0001] This application claims the benefit of provisional U.S. Application No. 62/673,756, filed, May 18, 2018, the entirety of which is hereby incorporated by reference for all purposes.

### FIELD OF THE INVENTION

[0002] The present invention provides isolated and processed cell therapeutic compositions and methods of using them for the treatment of a patient undergoing a hematopoietic stem cell transplant (HSCT) during treatment for a disorder such as a malignancy, primary immune deficiency, genetic disorder, metabolic disorder or a form of abnormal cellular proliferation such as an autoimmune disease. In certain aspects, the invention can be used for the combined prevention and/or treatment of cancer recurrence, viral infection, and graft versus host disease (GVHD). The isolated cell compositions provided herein include multiple cell subpopulations, wherein each specific cell subpopulation is directed to the prevention of, or treatment of, a particular comorbidity common with HSCT. The present invention also extends to methods of manufacturing such cell therapeutic compositions and the generation of a bank of multiple antigen-specific T-cell and mesenchymal stem cell compositions from healthy donors to provide an improved personalized cell therapy.

### BACKGROUND OF THE INVENTION

[0003] Hematopoietic stem cell transplantation (HSCT) involves the intravenous infusion of autologous or allogeneic stem cells collected from bone marrow, peripheral blood, or umbilical cord blood to reestablish hematopoietic function in patients whose bone marrow or immune system is damaged or defective. This procedure is often performed as part of therapy to eliminate a bone marrow infiltrative process, such as leukemia, or to correct congenital immunodeficiency disorders. In addition, HSCT is used to allow patients with cancer to receive higher doses of chemotherapy than bone marrow can usually tolerate. Bone marrow function is then salvaged by replacing the marrow with previously harvested stem cells. Examples of emerging indications for HSCT include replacement of marrow progenitors for the purpose of making normal red cells (e.g., in hemoglobinopathies), making corrective enzymes (e.g., in storage disorders), and mediating tissue repair (e.g., in epidermolysis bullosa). More than 50,000 first HSCTs—53% autologous and 47% allogeneic—are performed every year worldwide, according to the Worldwide Network of Blood and Marrow Transplantation. The number continues to increase by 10-20% annually.

[0004] The preparative or conditioning regimen is a critical element in hematopoietic stem cell transplantation (HSCT). The purpose of the preparative regimen is to provide immunosuppression sufficient to prevent rejection of the transplanted graft and to eradicate the disease for which the transplantation is being performed. These goals have traditionally been achieved by delivering maximally tolerated doses of multiple chemotherapeutic agents with nonoverlapping toxicities (with or without radiation). Infusion of hematopoietic cells circumvents the problem of prolonged myelosuppression from chemotherapy, permitting escalation to considerably higher dose levels. However, marrow recovery still takes weeks and requires sophisticated supportive care until the effects of chemotherapy have lessened. Unfortunately, significant morbidity and mortality is associated with the underlying disease as well as complications due to the treatment itself. The three major causes of mortality after HSCT are relapse of the underlying malignancy, infection, and graft versus host disease.

[0005] Allogeneic hematopoietic cell transplantation (alloHSCT) is a potentially curative treatment option for patients with acute myeloid leukemia (AML); however, relapse accounts for approximately 40% of alloHSCT treatment failures. Among relapsed patients the 2-year post-relapse survival rate is reported at less than 20% (Devillier et al., Blood (2012) 119(6): 1228-1234). Unfortunately, sustainable remissions are rare in patients with post-transplant AML relapse, especially for those relapsing soon after alloHSCT (Arellano et al., Biol. of Blood and Marrow Trans. (2007) 1:116-123). Commonly used treatment options for relapsed patients include intensive chemotherapy with or without donor lymphocyte infusion (DLI), second alloHSCT, withdrawal of immunosuppression, or supportive care (Schmid et al., Jour Clin Onc (2007) 25(31) 4938-4945).

[0006] Viral infections remain a leading cause of morbidity and mortality after allogeneic hematopoietic stem cell transplantation (HSCT) (Moss et al., Nat Rev Immunol (2005); 5(1):9-20). Infections caused 8-16% of deaths in post-HCT recipients in 2008-09 (Pasquini M C. Current Uses and Outcomes of Hematopoietic Stem Cell Transplantation: CIBMTR Summary Slides. Available at www.cibmtr.org 2011). Viral infections play a major role in the post-transplant recipients (Wingard J R. Leuk Lymphoma (1993); 11 (Suppl 2): 115-25) and constitute up to 43% of all infections (George et al., Bone Marrow Transplant (2004); 33: 311-5). The use of prophylactic pharmacotherapy is effective in reducing the risk for some viral infections, but therapeutic options for breakthrough infections are complicated by toxicities, and for many viral infections there are limited/no effective prophylactic or therapeutic pharmacotherapies (Tomblyn et al., Biol Blood Marrow Transplant (2010); 16(2):294). T-cell reconstitution is a key requirement for effective antiviral control following HSCT, and factors that influence the speed of T-cell recovery also impact the risk of viral infection in this period (Leen et al., Immunol Rev (2014); 258(1):12-29.

[0007] Acute and chronic graft-versus-host disease (GVHD) are multisystem disorders that are common complications of allogeneic hematopoietic cell transplant (HCT). GVHD occurs when immune cells transplanted from a non-identical donor (the graft) recognize the transplant recipient (the host) as foreign, thereby initiating an immune reaction that causes disease in the transplant recipient. Acute GVHD is a significant cause of medical problems and death following an allogeneic stem cell transplantation. The frequency of acute GVHD varies significantly among populations, making it impossible to specify how common it is. Somewhere between 30 and 70 percent of transplant recipients develop acute GVHD, depending on donor type, transplant technique, and other features. Acute GVHD primarily affects the skin, the liver and the gastrointestinal tract (stomach, intestines and colon). Chronic GVHD is a syndrome that may involve a single organ or several organs. It is one of the leading causes of medical problems and death after allogeneic stem cell transplantation. Approximately 30-70 percent of patients receiving an allogeneic stem cell transplantation develop chronic GVHD. Since it is a chronic condition, it can last for years or even a lifetime. Chronic GVHD symptoms range from mild to life-threatening.

[0008] Intravenously administered glucocorticoids, such as prednisone, are the standard of care in acute GvHD (Goker et al., Experimental Hematology (2001) 29 (3): 259-77) and chronic GVHD (Menillo et al., Bone Marrow Transplantation (2001) 28 (8):807-8). The use of these glucocorticoids is designed to suppress the T-cell-mediated response by the host immune system; however, in high doses, this immune-suppression raises the risk of infections and cancer relapse.

[0009] Although significant improvement and advances in HSCT have occurred in the 50 years of treatment there remains a significant clinical need to reduce the significant morbidity and mortality associated with HSCT and improve the treatment and overall survival of patients who get HSCTs.

### SUMMARY OF THE INVENTION

[0010] The present invention provides isolated processed cell therapeutic compositions and methods of using such cell therapeutic compositions for the treatment of a patient with a disorder that is given a hematopoietic stem cell transplant (HSCT). The HSCT can be administered to a patient in conjunction with strong treatment for a tumor, including a hematopoietic or solid cancer, or for treatment of another type of disorder such as a primary immune deficiency, a genetic disorder, or abnormal cellular proliferation such as an autoimmune disorder including multiple sclerosis, lupus, or other disorder serious enough to require treatment in conjunction with an HSCT.

[0011] One aspect is for a cell composition comprising: (i) one or more primed and expanded T-cell subpopulations having specificity for one or more tumor associated antigens; (ii) one or more primed and expanded T-cell subpopulations having specificity for one or more viral associated antigens; and (iii) one or more mesenchymal stem cell (MSC) subpopulations. In some aspects, the one or more T-cell subpopulations of (i) have specificity for a tumor associated antigen expressed by a tumor of the patient.

[0012] In some aspects, the one or more tumor associated antigens are selected from the group consisting of WT1, PRAME, Survivin, NY-ESO-1, MAGE-A3, MAGE-A4, Pr3, Cyclin A1, SSX2, Neutrophil Elastase (NE), and combination thereof. In some aspects, the one or more tumor associated antigens are PRAME, Survivin, and WT1.

[0013] In some aspects, the one or more virus associated antigens are selected from the group consisting of immediate-early protein 1 (IE-1), immediate-early protein 2 (IE-2), 65 kDa phosphoprotein (pp65), EBNA-leader protein (EBNA-LP), EBNA1, EBNA2, EBNA3a, EBNA3b, EBNA3c, latent membrane protein 1 (LMP1), latent membrane protein 2 (LMP2); envelope glycoprotein GP350/GP340, BARF1 mRNA export factor EB2 (BMLF1), DNA polymerase processivity factor (BMRF1), trans-activator protein (BZLF1), hexon protein of Human adenovirus 3 (HAdV-3), penton protein of Human adenovirus 5 (HAdV-5), capsid protein VP-1, capsid protein VP-2, large T antigen, small T antigen, U14, U54, U90, fusion glycoprotein (F), major surface glycoprotein G, small hydrophobic protein (SH), nucleocapsid (N) protein, matrix protein (MP) 1, matrix protein (MP) 2, nucleocapsid protein (NP) 1, neuroaminidase, hemagglutinin (HA), protein E4, protein E5, protein E6, protein E7, late major capsid protein (L) 1, replication protein E1, replication protein E2, envelope glycoprotein gp160 (Env), Gag polyprotein, Nef protein, Pol polyprotein, and a combination thereof. In such aspects, the one or more virus associated antigens can be selected from the group consisting of IE-1, pp65, EBNA1, LMP1, LMP2, Hexon, Penton, LT, VP-1, MP1, NP1, N, F, U14, U90, and a combination thereof.

[0014] In some aspects, the one or more virus associated antigens comprise: (a) a viral associated antigen selected from the group consisting of IE-1, pp65, and a combination thereof; (b) a viral associated antigen selected from the group consisting of EBNA1, LMP1, LMP2, BARF1, BZLF1, and a combination thereof; (c) a viral associated antigen selected from the group consisting of Hexon, Penton, and a combination thereof; (d) a viral associated antigen selected from the group consisting of LT, VP-1, and a combination thereof; (e) a viral associated antigen selected from the group consisting of MP1, NP1, and a combination thereof; (f) a viral associated antigen selected from the group consisting of N, F, and a combination thereof; and (g) a viral associated antigen selected from the group consisting of U14, U90, and a combination thereof.

[0015] In some aspects, the MSC subpopulation is from bone marrow or cord blood.

[0016] In some aspects, the MSC subpopulation comprises greater than 95% of cells having a positive antigen expression pattern CD29, CD105, CD73, and CD90, and less than 2% of cells having an antigen expression pattern CD45, CD34, CD3, CD14, CD19, and HLA-DR.

[0017] In some aspects, the T-cell subpopulations of (i) are from an allogeneic donor. In some aspects, the T-cell subpopulations of (i) are from cord blood. In some aspects, the T-cell subpopulations of (i) are primed ex vivo.

[0018] In some aspects, the T-cell subpopulations of (ii) are from an allogeneic donor. In some aspects, the T-cell subpopulations (ii) are from cord blood. In some aspects, the T-cell subpopulations of (ii) are primed ex vivo.

[0019] Another aspect is for a method of treating a malignancy or tumor in a subject in need thereof, comprising administering an effective amount of the cell composition to the subject. In some aspects, the malignancy is a hematological malignancy. In such aspects, the hematological malignancy can be selected from the group consisting of leukemia, lymphoma, and multiple myeloma.

[0020] In some aspects, the tumor is a solid tumor. In such aspects, the solid tumor can be selected from the group consisting of a neuroblastoma, glioma, soft tissue cancer, germ cell cancer, breast cancer, Ewing's sarcoma, lung cancer, ovarian cancer, renal cell carcinoma, colon cancer, and melanoma.

[0021] In some aspects, the subject is receiving or has received an hematopoietic stem cell transplantation (HSCT).

[0022] A further aspect is for a cell composition comprising: (i) one or more primed and expanded T-cell subpopulations having specificity for one or more viral associated antigens; and (ii) one or more mesenchymal stem cell (MSC) subpopulations. In some aspects, the one or more virus associated antigens are selected from the group consisting of immediate-early protein 1 (IE-1), immediate-early protein 2 (IE-2), 65 kDa phosphoprotein (pp65), EBNA-leader protein (EBNA-LP), EBNA1, EBNA2, EBNA3a, EBNA3b, EBNA3c, latent membrane protein 1 (LMP1), latent membrane protein 2 (LMP2); envelope glycoprotein GP350/GP340, BARF1 mRNA export factor EB2 (BMLF1), DNA polymerase processivity factor (BMRF1), trans-activator protein (BZLF1), hexon protein of Human adenovirus 3 (HAdV-3), penton protein of Human adenovirus 5 (HAdV-5), capsid protein VP-1, capsid protein VP-2, large T antigen, small T antigen, U14, U54, U90, fusion glycoprotein (F), major surface glycoprotein G, small hydrophobic protein (SH), nucleocapsid (N) protein, matrix protein (MP) 1, matrix protein (MP) 2, nucleocapsid protein (NP) 1, neuroaminidase, hemagglutinin (HA), protein E4, protein E5, protein E6, protein E7, late major capsid protein (L) 1, replication protein E1, replication protein E2, envelope glycoprotein gp160 (Env), Gag polyprotein, Nef protein, Pol polyprotein, and a combination thereof. In such aspects, the one or more virus associated antigens can be selected from the group consisting of IE-1, pp65, EBNA1, LMP1, LMP2, Hexon, Penton, LT, VP-1, MP1, NP1, N, F, U14, U90, and a combination thereof.

[0023] In some aspects, the one or more virus associated antigens comprise: (a) a viral associated antigen selected from the group consisting of IE-1, pp65, and a combination thereof; (b) a viral associated antigen selected from the group consisting of EBNA1, LMP1, LMP2, BARF1, BZLF1, and a combination thereof (c) a viral associated antigen selected from the group consisting of Hexon, Penton, and a combination thereof; (d) a viral associated antigen selected from the group consisting of LT, VP-1, and a combination thereof (e) a viral associated antigen selected from the group consisting of MP1, NP1, and a combination thereof (f) a viral associated antigen selected from the group consisting of N, F, and a combination thereof; and (g) a viral associated antigen selected from the group consisting of U14, U90, and a combination thereof.

[0024] In some aspects, the MSC subpopulation is from bone marrow or cord blood.

[0025] In some aspects, the MSC subpopulation comprises greater than 95% of cells having a positive antigen expression pattern CD29, CD105, CD73, and CD90, and less than 2% of cells having an antigen expression pattern CD45, CD34, CD3, CD14, CD19, and HLA-DR.

[0026] In some aspects, the T-cell subpopulations are from an allogeneic donor.

[0027] In some aspects, the T-cell subpopulations are from cord blood.

[0028] In some aspects, the T-cell subpopulations are primed and expanded ex vivo.

[0029] An additional aspect is for a method of treating a non-malignant indication in a subject, comprising administering an effective amount of the cell composition to the subject. In some aspects, the non-malignant indications is an autoimmune disease, a metabolic disorder, or a primary immune deficiency disorder. In such aspects, the autoimmune disease can be multiple sclerosis, myasthenia gravis, Crohn's disease, or lupus; the metabolic disorder can be Mucopolysaccaridosis, Krabbe Disease, or Gaucher Disease; and the primary immune deficiency disorder can be Wiskott-Aldrich Syndrome or Severe combined immunodeficiency (SCID).

[0030] In some aspects, the subject is receiving or has received an hematopoietic stem cell transplantation (HSCT).

[0031] Another aspect is for a method of treating a malignancy or tumor in a subject, comprising:

[0032] (i) determining a human leukocyte antigen (HLA) subtype of the subject;

[0033] (ii) diagnosing a malignancy or tumor type of the subject;

[0034] (iii) identifying two or more tumor associated antigens associated with the tumor type for targeting with a tumor associated antigen (TAA)-specific T-cell subpopulation;

[0035] (iv) selecting at least one banked T-cell subpopulation for each targeted TAA, wherein the T-cell subpopulation selected has at least one shared allele or allele combination with the targeted TAA;

[0036] (v) identifying one or more viral associated antigens for targeting with viral associated antigen (VAA)-specific T-cell subpopulations;

[0037] (vi) selecting at least one banked T-cell subpopulation for each targeted VAA, wherein the T-cell subpopulation selected has at least one shared allele or allele combination with the targeted VAA;

[0038] (vii) selecting at least one banked mesenchymal stem cell (MSC) population;

[0039] (viii) combining each selected banked T-cell subpopulation and MSC population to create a cell composition; and

[0040] (ix) administering an effective amount of the cell composition to the subject.

[0041] A further aspect is for a method of selecting a therapy for a subject in need thereof, comprising:

[0042] (i) determining a human leukocyte antigen (HLA) subtype of the subject;

[0043] (ii) determining a tumor associated antigen (TAA) expression profile of the malignancy or tumor;

[0044] (iii) identifying two or more tumor associated antigens expressed by the tumor for targeting with TAA-specific T-cell subpopulations;

[0045] (iv) selecting one banked T-cell subpopulation for each targeted TAA, wherein the T-cell subpopulation selected has at least one shared allele or allele combination with the targeted TAA;

[0046] (v) identifying one or more viral associated antigens for targeting with viral associated antigen (VAA)-specific T-cell subpopulations;

[0047] (vi) selecting at least one banked T-cell subpopulation for each targeted VAA, wherein the T-cell subpopulation selected has at least one shared allele or allele combination with the targeted VAA; and

[0048] (vii) selecting at least one banked mesenchymal stem cell (MSC) population.

[0049] An additional aspect is for a method of treating a non-malignant indication in a subject, comprising:

[0050] (i) determining a human leukocyte antigen (HLA) subtype of the subject;

[0051] (ii) identifying one or more viral associated antigens for targeting with viral associated antigen (VAA)-specific T-cell subpopulations;

[0052] (iii) selecting at least one banked T-cell subpopulation for each targeted VAA, wherein the T-cell subpopulation selected has at least one shared allele or allele combination with the targeted VAA;

[0053] (iv) selecting at least one banked mesenchymal stem cell (MSC) population;

[0054] (v) combining each selected banked T-cell subpopulation and MSC population to create a T-cell/mesenchymal stem cell composition; and

[0055] (vi) administering an effective amount of the T-cell/mesenchymal stem cell composition to the subject.

[0056] In some aspects of the aforementioned methods, the subject is receiving or has received an hematopoietic stem cell transplantation (HSCT).

[0057] A further aspect is for a bank of T-cell subpopulations and mesenchymal stem cells (MSC) subpopulations comprising: (i) one or more primed and expanded T-cell subpopulations having specificity for one or more tumor associated antigens; (ii) one or more primed and expanded T-cell subpopulations having specificity for one or more viral associated antigens; and (iii) one or more mesenchymal stem cell (MSC) subpopulations.

[0058] In some aspects, the T-cell subpopulations of (i) are from an allogeneic donor.

[0059] In some aspects, the T-cell subpopulations of (ii) are from an allogeneic donor.

[0060] In some aspects, the T-cell subpopulations of (i) are primed and expanded ex vivo.

[0061] In some aspects, the T-cell subpopulations of (ii) are primed and expanded ex vivo.

Isolated and Processed Cell Therapies for Treatment of HSCT Patients with Malignancies

[0062] In some embodiments, the inventive isolated processed cell therapeutic compositions are used for the combined prevention and/or treatment of cancer recurrence, viral infection, and graft versus host disease (GVHD). The isolated cell compositions provided herein for this aspect include multiple cell subpopulations, wherein each specific cell subpopulation is directed to the prevention of, or treatment of, a particular comorbidity common with HSCT in conjunction with cancer therapy. In particular, the isolated cell subpopulations provided herein include i) one or more of a first T-cell subpopulation specific for one or more tumor associated antigens (TAAs) for the prevention and/or targeting of residual or relapsed cancer cells; ii) one or more of a second T-cell subpopulation specific for one or more viral-associated antigens (VAAs) for the targeting and/or prevention of one or more viral infections such as, but not limited to, cytomegalovirus (CMV), Epstein Barr Virus (EBV), adenovirus (AdV), human herpesvirus (HHV), BK virus (BKV), and human parainfluenza virus (HPIV), adeno-associated virus (AAV), human papillomavirus (HPV), and respiratory syncytial virus (RSV), among others; and iii) a mesenchymal stem cell (MSC) subpopulation for the prevention and/or treatment of GVHD. By providing a single dosage form comprising multiple targeted and specific cell subpopulations, a patient receiving HSCT can be treated for the common adverse events associated with HSCT with a single product. The resulting cell therapeutic composition is known as a “TVM” composition.

[0063] The TVM composition for treatment of cancer-related HSCT is comprised of three separate cellular subpopulations each directed to prevent and/or treat a common adverse event associated with HSCT. The TVM composition in this embodiment is administered to a patient that has undergone a HSCT for the purposes of treating an underlying hematological malignancy or solid tumor. As such, the TVM composition includes one or more T-cell subpopulations directed to one or more tumor-associated antigens (TAAs) associated with the underlying hematological malignancy or solid tumor of the patient. These TAA-specific T-cell subpopulations are primed to one or more TAAs and expanded ex vivo. The TAA-specific T-cell subpopulation may be activated by the use of pooled, multi-TAA overlapping peptide libraries, wherein the multi-TAA overlapping peptide library includes two or more tumor antigen peptide libraries. In an alternative embodiment, the T-cell subpopulation for inclusion in the TVM composition is comprised of a combined set of TAA-specific T-cell subpopulations, wherein each T-cell subpopulation is directed to a single TAA. For example, the TAA T-cell subpopulations are each exposed to single TAA overlapping peptide libraries or one or more peptides from a single TAA, including and perhaps substantially comprised of selected peptide epitope(s) of the TAA. In some embodiments, the mastermix of peptides includes both an overlapping peptide library and specifically selected HLA-restricted peptides generated by determining the HLA profile of the donor source. The TAA T-cell subpopulation of the TVM composition may include more than one, for example two, three, four, or five T-cell subpopulations, wherein each T-cell subpopulation is specific for a single TAA; for example, the separate T-cell subpopulations that comprise the TVM composition are each primed with a single tumor antigen, for example each T-cell subpopulation is capable of recognizing one TAA.

[0064] In some embodiments, the TAA T-cell subpopulation is primed with a single TAA peptide mix, wherein the peptide mix comprises antigenic epitopes derived from a TAA based on one or more of the donor's HLA phenotypes, for example, the peptides are restricted through one or more of the cell donor's HLA alleles such as, but not limited to, HLA-A, HLA-B, and HLA-DR. By including specifically selected donor HLA-restricted peptides from a single TAA in the peptide mix for priming and expanding each TAA T-cell subpopulation, a TAA T-cell subpopulation can be generated that provides greater TAA targeted activity through one or more donor HLA alleles, improving potential efficacy of the T-cell subpopulation for patients that share at least one HLA allele with the donor. In addition, by generating a TAA T-cell subpopulation with TAA targeted activity through more than one donor HLA allele, a single donor TAA T-cell subpopulation may be included in the TVM composition for multiple recipients with different HLA profiles by matching one or more donor HLA alleles showing TAA-activity. In some embodiments, the TAA peptides used to prime and expand a TAA T-cell subpopulation are generated based on a cell donor's HLA profile, wherein the peptides are HLA-restricted epitopes specific to at least one or more of a donor's HLA-A alleles, HLA-B alleles, or HLA-DR alleles, or a combination thereof. In some embodiments, the HLA-A alleles are selected from a group comprising HLA-A*01, HLA-A*02:01, HLA-A*03, HLA-A*11:01, HLA-A*24:02, HLA-A*26, and HLA-A*68:01. In some embodiments, the HLA-B alleles are selected from a group comprising HLA-B*07:02, HLA-B*08, HLA-B*15:01 (B62), HLA-B*18, HLA-B*27:05, HLA-B*35:01, and HLA-B*58:02. In some embodiments, the HLA-DR alleles are selected from a group comprising HLA-DRB1*0101, HLA-DRB1*0301 (DR17), HLA-DRB1*0401 (DR4Dw4), HLA-DRB1*0701, HLA-DRB1*1101, and HLA-DRB1*1501 (DR2b). In some embodiments, the mastermix of peptides includes both an overlapping peptide library and specifically selected HLA-restricted peptides generated by determining the HLA profile of the donor source.

[0065] The particular T-cell subpopulations that are included in the TVM composition target TAAs that are representative of, or associated with, the TAA expression profile of the patient's underlying malignancy. In some embodiments, the TAA-targeting T-cell subpopulation in the TVM composition correlates with the tumor-associated antigen expression profile of the malignancy in the patient receiving the treatment. In an alternative embodiment, the TAA targeting T-cell subpopulations that are included in the TVM composition target TAAs that are typically associated with the patient's malignancy. For example, the TAAs targeted may be one or more TAAs that are generally or commonly expressed in the particular hematological malignancy or solid tumor of the patient.

[0066] The generation of the TAA T-cell subpopulation can be accomplished through the ex vivo priming and activation of the T-cell subpopulation to one or more peptides from a single TAA, or in an alternative, one or more peptides from multiple TAAs. If more than one peptide from a single, targeted tumor antigen is used, the peptide segments can be generated by making overlapping peptide fragments of the tumor antigen, as provided for example, in commercially available overlapping peptide libraries, or can be selected to be limited to, or enriched with, certain antigenic epitopes of the targeted TAA, for example, a single, or multiple specific epitopes of the TAA. In some embodiments, the T-cell subpopulation is primed with a single TAA peptide mix, wherein the peptide mix includes a overlapping peptide library that has been further enriched with one or more specific known or identified epitopes expressed by the patient's malignancy. In some embodiments, the T-cell subpopulation is primed with a multi-TAA peptide mix, wherein the peptide mix includes a overlapping peptide library that has been further enriched with one or more specific known or identified tumor antigenic epitopes expressed by the patient's malignancy. In some embodiments, the peptide segments are the same length. In some embodiments, the peptide segments are of varying lengths. In other embodiments, the peptide segments substantially only include known tumor antigenic epitopes. In some embodiments, the T-cell subpopulation is primed and activated with one or more epitopes expressed by the patient's malignancy. In some embodiments, the tumor antigen is a neoantigen. In some embodiments, the neoantigen is a mutated form of an endogenous protein derived through a single point mutation, a deletion, an insertion, a frameshift mutation, a fusion, mis-spliced peptide, or intron translation.

[0067] In some embodiments, a T-cell subpopulation used in the TVM composition is capable of recognizing one epitope, two epitopes, three epitopes, or more than three epitopes of a single TAA. In some embodiments, the TVM composition includes more than one T-cell subpopulation targeting the same TAA, wherein each T-cell subpopulation is capable of recognizing discrete and separate epitopes within the same TAA.

[0068] The TAA T-cell subpopulations of the TVM composition are generated to be specific to one or more TAAs. TAAs for targeting by the TAA T-cell subpopulations may include any TAA expressed by the malignancy, for example, an oncofetal, an oncoviral, overexpressed/accumulated, cancer-testis, lineage-restricted, mutated, post-translationally altered, or idiotypic antigen. Although they are preferentially expressed by cancer cells, TAAs are oftentimes found in normal tissues. However, their expression differs from that of normal tissues by their degree of expression in the malignancy, alterations in their protein structure in comparison with their normal counterparts or by their aberrant subcellular localization within malignant cells. Non-limiting examples of TAAs, in certain embodiments, for targeting may be selected from one or more peptide segment(s), overlapping peptide libraries, or selected epitope(s) of Carcinoembryonic antigen (CEA), immature laminin receptor, and tumor-associated glycoprotein (TAG) 72, latent membrane protein (LMP) 1 and 2, BING-4, calcium-activated chloride channel (CLCA) 2, Cyclin B1, 9D7, epithelial cell adhesion molecule (Ep-Cam), EphA3, Her2/neu, telomerase, mesothelin, stomach cancer-associated protein tyrosine phosphatase 1 (SAP-1), survivin, b melanoma antigen (BAGE) family, cancer-associated gene (CAGE) family, G antigen (GAGE) family, melanoma antigen (MAGE) family, sarcoma antigen (SAGE) family, X antigen (XAGE) family, CT9, CT10, NY-ESO-1, L antigen (LAGE) 1, Melanoma antigen preferentially expressed in tumors (PRAME), synovial sarcoma X (SSX) 2, melanoma antigen recognized by T cells-1/2 (Melan-A/MART-1/2), Gp100/pmel17, tyrosinase, tyrosine-related protein (TRP) 1 and 2, P.polypeptide, melanocortin 1 receptor (MC1R), prostate-specific antigen, β-catenin, breast cancer antigen (BRCA) 1/2, cyclin-dependent kinase (CDK) 4, chronic myelogenous leukemia antigen (CML) 66, fibronectin, MART-2, p53, Ras, TGF-βRII, mucin (MUC) 1, immunoglobulin (Ig) and T cell receptor (TCR).

[0069] In some embodiments, the TVM composition includes one or more T-cell subpopulations targeting WT1, PRAME, Survivin, NY-ESO-1, MAGE-A3, MAGE-A4, Pr3, Cyclin A1, SSX2, Neutrophil Elastase (NE), or a combination thereof. In some embodiments, the TVM composition includes one or more T-cell subpopulations targeting WT1, PRAME, and Survivin. In some embodiments, the targeted antigens do not include MAGE-A3.

[0070] Importantly, TAA T-cell subpopulations can be optimized for personal efficacy in the patient by testing each T-cell subpopulation for activity against and responsiveness to the patient's underlying malignant cells. Therefore, in some embodiments, the invention includes priming and activating TAA T-cell subpopulations for inclusion in a TVM composition which have been primed and activated with specific TAAs based on malignancy-type of the patient. In some embodiments, epitopes expressed by a patient's malignancy are first identified and T-cell subpopulations primed to those epitopes are included in the TVM composition. In an alternative embodiment, specific epitopes expressed by a patient's malignancy are first identified and included in a overlapping peptide library used to prime and activate a T-cell subpopulation. By using or including specifically expressed patient tumor associated epitopes in a peptide mix to prime and activate specific T-cell subpopulations, the peptide mix for the specific TAA can be optimized, and the ability of the T-cell subpopulation to recognize the TAA confirmed ex vivo. In some embodiments, the generated T-cell subpopulation can be tested for activity against the patient's malignant cells ex vivo to confirm a robust response. This can be repeated for some or all of the remaining TAA T-cell subpopulations comprising the TVM composition until it is confirmed that one, some or all of the TAA T-cell subpopulations are primed and activated against the targeted TAAs of the patient.

[0071] In some embodiments, a sample of the patient's malignant cells is taken by biopsy, blood sample or other isolation and is used to derive a profile of antigenic proteins expressed in the malignancy, and the TAA T-cell subpopulations of the TVM composition target one or more of the expressed tumorigenic antigens. In another embodiment, an epitope profile of expressed antigenic proteins is identified, and the TAA T-cell subpopulations of the TVM composition target one or more of the identified epitopes. It is preferred to select antigenic proteins that are not overexpressed self-proteins which have not been mutated, rearranged or otherwise altered over the normal sequence and conformation, as these typically do not evoke a strong response in vivo.

[0072] Patients undergoing HSCT generally undergo a myelo-ablative preparative regimen—with or without radiation—in order to eliminate the hematological malignancy or tumor. In doing so, the patient's endogenous immune system is largely, if not entirely, eliminated. While the patient's recipient HSCT will naturally include immune effector cells directed to a number of viruses, that is, the donor is likely to be seropositive for certain viruses, a common side effect following HSCT is susceptibility to a large number of viruses. The TVM composition provided herein includes one or more T-cell subpopulations directed to one or more viral-associated antigens (VAAs) targeting common viruses that HSCT recipients are susceptible to. These VAA-specific T-cell subpopulations are primed to one or more VAAs and expanded ex vivo. The VAA-specific T-cell subpopulation may be derived by the use of pooled, multi-VAA overlapping peptide libraries, wherein the multi-VAA overlapping peptide library includes two or more viral antigen peptide libraries. In an alternative embodiment, the T-cell subpopulation for inclusion in the TVM composition is comprised of a combined set of VAA-specific T-cell subpopulations, wherein each T-cell subpopulation used for combining is directed to a single virus, for example, the VAA T-cell subpopulations are each exposed to single viral associated antigen overlapping peptide libraries or one or more peptides from a single viral associated antigen, including and perhaps substantially comprised of selected peptide epitope(s) of the viral associated antigen. The VAA T-cell subpopulation of the TVM composition may include more than one, for example two, three, four, five, or six T-cell subpopulations, wherein each T-cell subpopulation is specific for a single virus; for example, the separate T-cell subpopulations that comprise the TVM composition are each primed to one or more viral antigens from a single virus, for example each T-cell subpopulation is capable of recognizing one virus.

[0073] The generation of the VAA T-cell subpopulation can be accomplished through the ex vivo priming and activation of the T-cell subpopulation to one or more peptides from a single VAA, or in an alternative, one or more peptides from multiple VAAs. If more than one peptide from a single, targeted viral antigen is used, the peptide segments can be generated by making overlapping peptide fragments of the viral antigen, as provided for example, in commercially available overlapping peptide libraries, or can be selected to be limited to, or enriched with, certain antigenic epitopes of the targeted virus, for example, a single, or multiple specific epitopes of the virus. In some embodiments, the mastermix of peptides includes both an overlapping peptide library and specifically selected HLA-restricted peptides generated by determining the HLA profile of the donor source. In some embodiments, the peptide segments are the same length. In some embodiments, the peptide segments are of varying lengths. In other embodiments, the peptide segments substantially only include known viral antigenic epitopes. In some embodiments, the VAA T-cell subpopulation is primed and activated with one or more epitopes from a virus that the donor of the HSCT is seronegative for. In some embodiments, the VAA T-cell subpopulation is primed and activated with one or more epitopes from a virus that the patient was seropositive for before receiving the HSCT.

[0074] In some embodiments, a VAA T-cell subpopulation used in the TVM composition is capable of recognizing one epitope, two epitopes, three epitopes, or more than three epitopes of a single VAA. In some embodiments, the TVM composition includes more than one T-cell subpopulation targeting the same VAA, wherein each T-cell subpopulation is capable of recognizing discrete and separate epitopes within the same VAA.

[0075] In some embodiments, the VAA T-cell subpopulation is primed with a single VAA peptide mix, wherein the peptide mix comprises antigenic epitopes derived from a VAA based on one or more of the donor's HLA phenotypes, for example, the peptides are restricted through one or more of the cell donor's HLA alleles such as, but not limited to, HLA-A, HLA-B, and HLA-DR. By including specifically selected donor HLA-restricted peptides from a single VAA in the peptide mix for priming and expanding each T-cell subpopulation, a T-cell subpopulation can be generated that provides greater VAA targeted activity through one or more donor HLA alleles, improving potential efficacy of the T-cell subpopulation for patients that share at least one HLA allele with the donor. In addition, by generating a T-cell subpopulation with VAA targeted activity through more than one donor HLA allele, a single donor T-cell subpopulation may be included in a TVM composition for multiple recipients with different HLA profiles by matching one or more donor HLA alleles showing VAA-activity. In some embodiments, the TAA peptides used to prime and expand a T-cell subpopulation are generated based on a cell donor's HLA profile, wherein the peptides are HLA-restricted epitopes specific to at least one or more of a donor's HLA-A alleles, HLA-B alleles, or HLA-DR alleles, or a combination thereof. In some embodiments, the HLA-A alleles are selected from a group comprising HLA-A*01, HLA-A*02:01, HLA-A*03, HLA-A*11:01, HLA-A*24:02, HLA-A*26, and HLA-A*68:01. In some embodiments, the HLA-B alleles are selected from a group comprising HLA-B*07:02, HLA-B*08, HLA-B*15:01 (B62), HLA-B*18, HLA-B*27:05, HLA-B*35:01, and HLA-B*58:02. In some embodiments, the HLA-DR alleles are selected from a group comprising HLA-DRB1*0101, HLA-DRB1*0301 (DR17), HLA-DRB1*0401 (DR4Dw4), HLA-DRB1*0701, HLA-DRB1*1101, and HLA-DRB1*1501 (DR2b). In some embodiments, the mastermix of peptides includes both an overlapping peptide library and specifically selected HLA-restricted peptides generated by determining the HLA profile of the donor source.

[0076] The VAA T-cell subpopulations of the TVM composition are generated to be specific to one or more VAAs. Each virus has its own VAAs. Non-limiting examples of VAAs, in certain embodiments, for targeting may be selected from one or more peptide segment(s), overlapping peptide libraries, or selected epitope(s) of immediate-early protein 1 (IE-1), immediate-early protein 2 (IE-2), 65 kDa phosphoprotein (pp65), Epstein-Barr Nuclear Antigen (EBNA) family, which includes EBNA-leader protein (EBNA-LP), EBNA1, EBNA2, EBNA3a, EBNA3b, EBNA3c; latent membrane protein (LMP) family, which includes LMP1 and LMP2; envelope glycoprotein GP350/GP340; secreted protein BARF1; mRNA export factor EB2 (BMLF1); DNA polymerase processivity factor (BMRF1) and trans-activator protein (BZLF1), the hexon protein of Human adenovirus 3 (HAdV-3), the penton protein of Human adenovirus 5 (HAdV-5), capsid protein VP-1, capsid protein VP-2, large T antigen, small T antigen, U14, U54, U90, fusion glycoprotein (F), major surface glycoprotein G, small hydrophobic protein (SH), nucleocapsid (N) protein, matrix protein (MP) 1, matrix protein (MP) 2, nucleocapsid protein (NP) 1, neuroaminidase, hemagglutinin (HA), protein E4, protein E5, protein E6, protein E7, late major capsid protein (L) 1, replication protein E1, replication protein E2, envelope glycoprotein gp160 (Env), Gag polyprotein, Nef protein, and Pol polyprotein.

[0077] In some embodiments, the TVM composition includes one or more T-cell subpopulations specific to the viral-associated antigens IE-1, pp65, EBNA1, LMP1, LMP2, Hexon, Penton, LT, VP-1, MP1, NP1, N, F, U14 and U90, or a combination thereof. In some embodiments, the TVM compositions includes one or more T-cell subpopulations specific to at least one of the viral-associated antigens of CMV selected from IE-1 and pp65; at least one of the viral-associated antigens of EBV selected from EBNA1, LMP1, LMP2, BARF1 and BZLF1; at least one of the viral-associated antigens of AdV selected from Hexon and Penton; at least one of the viral-associated antigens of BK virus selected from LT and VP-1; at least one of the viral-associated antigens of parainfluenza selected from MP1 and NP1; at least one of the viral-associated antigens of RSV selected from N and F; and at least one of the viral-associated antigens from HHV6 selected from U14 and U90.

[0078] In certain nonlimiting embodiments, each TAA and VAA T-cell subpopulation is prepared by pulsing antigen presenting cells (APCs) or artificial antigen presenting cells (aAPCs) with a single peptide or epitope, several peptides or epitopes, or even with peptide libraries of one or more targeted antigens, that for example, include peptides that are about 7, 8, 9, 10, 11, 12, 13, 14, 15 16 or more amino acids long and overlapping one another by 5, 6, 7, 8, 9, 10, 11, 12 or 13 amino acids, in certain aspects. Examples include overlapping peptide libraries from JPT Technologies or Miltenyi. In particular embodiments, the peptides are 7, 8, 9, 10, 11, 12, 13, 14, 15, 16, 17, 18, 19, 20, 21, 22, 23, 24, 25, 26, 27, 28, 29, 30, 31, 32, 33, 34, or 35 or more amino acids in length, for example, and there is overlap of 5, 6, 7, 8, 9, 10, 11, 12, 13, 14, 15, 16, 17, 18, 19, 20, 21, 22, 23, 24, 25, 26, 27, 28, 29, 30, 31, 32, 33, or 34 amino acids in length.

[0079] Graft versus host disease is a difficult and potentially lethal complication of HSCT. It occurs with minor human leukocyte antigen (HLA) mismatch and is normally treated with corticosteroid and other immunosuppressive therapy. When it is refractory to steroid therapy, mortality approaches 80%. Graft-versus-host-disease is characterized by selective damage to the recipient patient's liver, skin (rash), mucosa, and the gastrointestinal tract induced by the donor's immune effector cells contained in the HSCT, and long term GVHD (chronic GVHD) may result in damage to the patient recipient's connective tissue and exocrine glands. The acute or fulminant form of the disease (aGVHD) is normally observed within the first 100 days post-transplant and is a major challenge to transplants owing to associated morbidity and mortality. The chronic form of graft-versus-host-disease (cGVHD) normally occurs after 100 days. The appearance of moderate to severe cases of cGVHD adversely influences long-term survival.

[0080] In order to treat and/or prevent GVHD, the TVM composition includes a mesenchymal stem cell subpopulation. Mesenchymal stem cells (MSCs) are multipotent stromal cells that can differentiate into a variety of cell types, including osteoblasts (bone cells), chondrocytes (cartilage cells), myocytes (muscle cells) and adipocytes (fat cells which give rise to marrow adipose tissue). The MSC subpopulation can be derived from bone marrow or cord blood. As multipotent stem cells, MSCs can differentiate into cells derived from the mesoderm germ layer, namely chondroblasts, adipocytes, and osteocytes. MSCs can be expanded in culture and possess complex and diverse immunomodulatory activity. Moreover, human MSCs carry low levels of class 1 and no class 2 HLA antigens, making them immunoprivileged and able to be used without HLA matching. In some embodiments, the MSC subpopulation contains greater than 95% of cells having the positive antigen expression pattern CD29, CD105, CD73, and CD90, and less than 2% of cells having the antigen expression pattern CD45, CD34, CD3, CD14, CD19, and HLA-DR.

[0081] The TAA T-cell, VAA T-cell, and MSC subpopulations can be generated from the same donor as used in the HSCT. In some embodiments, the TAA T-cell and VAA T-cell subpopulations for inclusion in the TVM composition are autologously derived. In some embodiments, the TAA T-cell and VAA T-cell subpopulations for inclusion in the TVM composition are derived from an allogeneic donor, for example, from the peripheral blood, apheresis product or bone marrow from a naïve, healthy donor. In some embodiments, the TAA-specific T-cell subpopulations for inclusion in the TVM composition are derived from cord blood. When derived from an allogeneic donor, the TAA T-cell subpopulation starting material will generally be naïve to the targeted TAA, while the VAA T-cell subpopulation may include one or more T-cell subpopulations that are initially naïve to the targeted viruses.

[0082] The TVM composition can be administered to a patient at the time of HSCT to treat a hematological malignancy or solid tumor. Alternatively, the TVM composition can be administered to a patient who has already received an HSCT to treat a hematological malignancy or solid tumor. The hematological malignancy may be a leukemia, lymphoma, or myeloma, including but not limited to acute myeloid leukemia (AML), acute lymphoblastic leukemia (ALL), chronic lymphoblastic leukemia (CLL), or multiple myeloma. The solid tumor may be neuroblastoma, glioma, soft tissue cancer, germ cell cancer, breast cancer, Ewing's sarcoma, lung cancer, ovarian cancer, renal cell carcinoma, colon cancer, melanoma and other solid tumors. In some embodiments, the hematological malignancy is a relapsed or refractory leukemia, lymphoma, or myeloma. In some embodiments, the solid tumor is a relapsed or refractory solid tumor.

Isolated and Processed T-Cell Therapies for Treatment of HSCT Patients with Disorders Other than Malignancies

[0083] The present invention also includes a method and composition to treat patients undergoing HSCT for a disorder other than a malignancy. In this alternative embodiment, the isolated cell subpopulations include i) one or more T-cell subpopulations specific for one or more viral-associated antigens (VAAs) for the targeting and/or prevention of one or more viral infections such as, but not limited to, cytomegalovirus (CMV), Epstein Barr Virus (EBV), adenovirus (AdV), human herpesvirus (HHV), BK virus (BKV), and human parainfluenza virus (HPIV), adeno-associated virus (AAV), human papillomavirus (HPV), and respiratory syncytial virus (RSV), among others; and ii) a mesenchymal stem cell (MSC) subpopulation for the prevention and/or treatment of GVHD. By providing a single dosage form comprising multiple targeted and specific cell subpopulations, a patient receiving HSCT can be treated for the common adverse events associated with HSCT with a single product. The resulting cell therapeutic composition is known as a “VM” composition.

[0084] The VM composition can be administered to a patient at the time of HSCT during treatment of a non-malignant disorder. Alternatively, the VM composition can be administered to a patient who has already received an HSCT to treat a non-malignant disorder. In these indications the patients are at risk for the HSCT complications including viral infections and GVHD. In some embodiments, the VM composition is used after an allogeneic HSCT as a treatment for a non-malignant indication. Non-malignant indications where allogeneic HSCT is currently employed include, but are limited to, autoimmune diseases, metabolic disorders and primary immune deficiency disorders. The autoimmune diseases could include, but are not limited to, multiple sclerosis, myasthenia gravis, Crohn's disease and lupus. The metabolic disorders could include, but are not limited to, Mucopolysaccharidosis, Krabbe Disease, and Gaucher Disease. The primary immune deficiency disorders could include, but are not limited to, Wiskott-Aldrich Syndrome and Severe combined immunodeficiency (SCID).

### Cell Banks for Patients Undergoing HSCT Therapies

[0085] In one aspect, the invention further includes a bank, and methods of manufacturing a bank, of individual T-cell subpopulations with an associated phenotypic characteristic database, which can be used in either TVM or VM therapy in conjunction with HSCT.

[0086] For TVM compositions, the bank includes individual TAA T-cell subpopulations which have been primed and activated to one or more TAAs, individual VAA T-cell subpopulations, which have been primed and activated to one or more viruses, and expanded MSC subpopulations. The cell subpopulations are derived from allogeneic donor sources, for example, the peripheral blood, apheresis product or bone marrow from a naïve, healthy donor and/or cord blood sample. The T-cell subpopulations are HLA-typed and the donor source recorded. In some embodiments, the donor source is the original HSCT donor for the patient. The T-cell subpopulations' antigenic recognition response is verified and characterized, for example, via ELISPOT IFN-γ assay, TNF-α assay, or other suitable activity indicator, to quantify the activity of the T-cell population against the specific, targeted TAA and VAA. Furthermore, the T-cell subpopulations' antigenic recognition response is further characterized through its corresponding HLA-allele, for example through an HLA restriction assay. The T-cell subpopulations and MSCs can be cryopreserved and stored. In some embodiments, the T-cell subpopulations and MSCs are stored by the donor source. In some embodiments, the T-cell subpopulations are stored by TAA and VAA specificity, respectively. In some embodiments, the T-cell subpopulations are stored by human leukocyte antigen (HLA) subtype and restrictions.

[0087] By characterizing each T-cell subpopulations' reactivity and corresponding HLA-allele, the T-cell subpopulations included in the TVM composition can be optimized for each patient based on specific T-cell subpopulation reactivity and HLA matching, providing a highly personalized therapy. Accordingly, if a patient has a malignancy that expresses one epitope of a TAA but not another, or if one epitope of a TAA invokes a greater T-cell response, that T-cell subpopulation can be taken from the bank and used in the TVM composition. Similarly, if a patient has a particular virus or is susceptible to a particular virus, that VAA T-cell subpopulation can be taken from the bank and used in the TVM composition. In this way, the T-cell therapy can be tailored to evoke a maximal response against the patient's tumor or viral complications.

[0088] This invention thus acknowledges and accounts for the fact that T-cells from various donors may have variable activity against the same tumor- or viral-associated antigen, or even the same epitope, generating T-cell responses with varying efficiency. This fact is taken into account when producing the comprehensive bank of a wide variety of allogeneic activated T-cells for personalized T-cell therapeutic composition of the invention. Derived T-cell subpopulations having shared HLA-alleles that exhibit strong activity to the targeted tumor- or viral-associated antigen can be selected from the bank for inclusion in the TVM composition. In some embodiments, one or more of the T-cell subpopulations for consideration for inclusion in the TVM composition are tested against malignant cells from the patient prior to administration in vivo by exposing the malignant cells in vitro to the one or more T-cell subpopulations and determining the T-cell subpopulation's ability to lyse the malignant cell. In this way, the probability of the TVM composition inducing a therapeutic response to a relapse or providing an effective prophylactic effect against a relapse upon administration to the patient is greatly enhanced.

[0089] For VM therapy, a cellular composition is provided as described above or generally herein where the TAA is excluded and T-cells that have been primed against one or more selected viral antigens are combined with mesenchymal cells.

[0090] In some embodiments, instead of using a banked T cell subpopulation or MSC population, a newly produced T cell subpopulation or MSC population, that has yet to be banked, can be used.

[0091] In some aspects, a portion of the newly produced T cell subpopulation, or MSC population, can be used to treat a patient and another portion can be banked for future use.

### Summary of Embodiments for TVM Composition, Use and Manufacture

[0092] In one aspect, provided herein is a method of treating a patient with a malignancy or tumor receiving HSCT comprising:
[0093] i) determining the HLA subtype of the patient;
[0094] ii) diagnosing the malignancy or tumor type of the patient;
[0095] iii) identifying two or more tumor associated antigens associated with the tumor type for targeting with TAA-specific T-cell subpopulations;
[0096] iv) selecting at least one banked T-cell subpopulation having the good activity against each targeted TAA through one or more HLA-alleles shared between the patient and the TAA T-cell subpopulations, wherein each T-cell subpopulation is specific for one or multiple tumor associated antigens, wherein each of the T-cell subpopulations are primed and expanded ex vivo;
[0097] v) identifying one or more viral associated antigens for targeting with VAA-specific T-cell subpopulations,
[0098] vi) selecting at least one banked T-cell subpopulation having the highest activity against one or more targeted VAA through one or more HLA-alleles shared between the patient and the VAA T-cell subpopulations, wherein each T-cell subpopulation is specific for multiple virus associated antigens, wherein each of the T-cell subpopulations are primed and expanded ex vivo;
[0099] vii) selecting at least one banked mesenchymal stem cell population
[0100] viii) combining each selected banked T-cell subpopulation and MSC population to create a TVM composition; and,
[0101] ix) administering an effective amount of the TVM composition to the patient; and,
[0102] x) repeating the administration of the TVM composition as necessary
   In some embodiments, the TVM composition is administered concomitantly with the HSCT. In some embodiments, the TVM composition is administered following HSCT.

[0103] In one aspect, provided herein is a method of treating a patient with a malignancy or tumor receiving HSCT comprising:
[0104] i) determining the HLA subtype of the patient;
[0105] ii) determining the TAA expression profile of the patient's malignancy or tumor;
[0106] iii) identifying two or more tumor associated antigens associated with the tumor type for targeting with TAA-specific T-cell subpopulations;
[0107] iv) selecting at least one banked T-cell subpopulation having the highest activity against each targeted TAA through one or more HLA-alleles shared between the patient and the TAA T-cell subpopulations, wherein each T-cell subpopulation is specific for one or multiple tumor associated antigens, wherein each of the T-cell subpopulations are primed and expanded ex vivo;
[0108] v) identifying one or more viral associated antigens for targeting with VAA-specific T-cell subpopulations;
[0109] vi) selecting at least one banked T-cell subpopulation having good activity against each targeted VAA through one or more HLA-alleles shared between the patient and the VAA T-cell subpopulations, wherein each T-cell subpopulation is specific for multiple virus associated antigens, wherein each of the T-cell subpopulations are primed and expanded ex vivo;
[0110] vii) selecting at least one banked mesenchymal stem cell population;
[0111] viii) combining each selected banked T-cell subpopulation and MSC population to create a TVM composition;
[0112] ix) administering an effective amount of the TVM composition to the patient; and,
[0113] x) repeating the administration of the TVM composition as necessary
   In some embodiments, the shared HLA alleles are selected from one or more of HLA-A, HLA-B, or HLA-DR. In some embodiments, the TVM composition is administered concomitantly with the HSCT. In some embodiments, the TVM composition is administered following HSCT.

[0114] In some embodiments, the TAA-specific T-cell subpopulation used in the TVM composition is selected based on the TAA expression profile of the patient. In some embodiments, the TAAs to target by the T-cell subpopulations used to create the TVM composition are selected by the healthcare practitioner based on the type of tumor that is diagnosed. In some embodiments, the multi-VAA-specific T-cell subpopulation used in the TVM composition is selected to provide coverage against viruses selected from the group comprising cytomegalovirus, Epstein-Barr virus, Adenovirus, Human Herpes Virus 6, BK polyoma virus and parainfluenza.

[0115] In a typical embodiment, a patient, such as a human, is infused or injected with an effective dose of a TVM composition ranging from 1×10⁶ to 1×10⁸ cells/m² of a TAA T-cell subpopulation, 1×10⁶ to 1×10⁸ cells/m² of a multi-VAA T-cell subpopulation, and 1−5×10⁶/kg of a MSC subpopulation. Alternatively, the cell subpopulations of a TVM composition are not combined into a single dosage form, but rather each cell subpopulation is administered separately. The patient may receive a second or additional infusion or injection about 1 or more weeks later if recommended by the health care practitioner and may receive additional doses subsequent thereto as useful and recommended.

[0116] The T-cells can be primed and activated using a number of known procedures. In one non-limiting aspect, the present invention includes a process for generating a T-cell subpopulation specific to either multiple TAA or multiple VAA to form TVM therapeutic compositions that includes but is not limited to:
[0117] i) identifying eligible donors who are negative to the patient's disease, and preferably healthy, and wherein the donor can be cord blood or PBMCs;
[0118] ii) collecting the mononuclear cells from the negative donor and optionally removing any effector or other memory T-cells optionally based on CD45RA⁻, CD45R⁺, CCR7⁻, CD62L⁻, CCR7⁺, and/or CD62L⁺ markers;
[0119] iii) separating the mononuclear cells into two components;
[0120] iv) separating the cells in the first component into nonadherent T-cells and precursors and adherent dendritic cells and precursors, using any method known in the art, for example exposure to a solid medium, separation magnetically, use of antibodies, etc., and if not done already, optionally removing any effector or other memory T-cells optionally based on CD45RA−, CD45RO+, CCR7, CD62L−, or CCR7+, CD62L+ markers;
[0121] v) differentiating monocytes and precursors to dendritic cells with IL-4 and GM-CSF, followed by treatment with maturing cytokines such as LPS, TNFα, IL-1β, IL-4, IL-6 and GM-CSF and then pulsing with one or more peptide(s) and/or epitope(s) from multiple selected TAAs or VAAs; and then irradiating to form dendritic antigen presenting cells (APCs);
[0122] vi) treating the nonadherent T-cells and precursors with cytokines IL-7 and IL-15 to polarize to Th1 cells (and in some embodiments, without the use of IL-12);
[0123] vii) mixing the dendritic antigen presenting cells from (v) with the non-adherent T-cells and T-cell precursor cells from (vi) in the presence of cytokines IL-6, optionally in a ratio of between 5:1 and 20:1 of (vi) to (v) to produce a T-cell subpopulation specific for a single TAA or VAA;
[0124] viii) treating the second component of mononuclear cells with a mitogen such as PHA, a T-blast, B-blast, lymphoblastic cell or CD3/CD28 Blast optionally in the presence of IL-2 to produce activated T-cells; and then irradiating the cells to inhibit growth;
[0125] ix) pulsing the PHA blasts in (viii) with selected antigenic peptide(s) and/or epitope(s) from the selected tumor-associated antigens and irradiating to inhibit growth;
[0126] x) mixing the antigen specific T-cells from (vii) with the activated T-cell subpopulation from (ix) optionally in the presence of K562 accessory cells (preferably HLA-negative, K562 cells expressing CD80, CD83, CD86 and/or 4-IBBL) or LPS, and optionally IL-15 and/or IL-2;
[0127] xi) recovering the produced multi-antigen-specific T-cell subpopulation;
[0128] xii) optionally characterizing the resulting T-cell subpopulation for banking; and,
[0129] xiii) optionally cryopreserving and storing in the bank until use.

[0130] In the above process, unless specific steps are taken to remove cell components of the donor blood starting material, for example, removal based on cell surface markers, etc., the final T-cell subpopulation will normally also include a range of cell types, such as Natural Killer T-cells, γδ T-cells, CD4+ T-cells, CD8+ (cytotoxic) T-cells, and Natural Killer T-cells, among others, and may have naïve, and effector memory or central memory cells. The ratios of these cell types in the TVM composition will vary according to the donor's blood and processing conditions.

[0131] In another aspect, the present invention includes a method of manufacturing a T-cell subpopulation of the present invention comprising (i) collecting a mononuclear cell product from a healthy donor; (ii) determining the HLA subtype of the mononuclear cell product; (iii) separating the monocytes and the lymphocytes of the mononuclear cell product; (iv) generating and maturing dendritic cells (DCs) from the monocyte fraction; (v) pulsing the DCs with one or more peptides and/or epitopes from multiple TAAs or VAAs; (vi) carrying out a CD45RA+ selection to isolate naïve lymphocytes from the lymphocyte fraction; (vii) stimulating the naïve lymphocytes with the peptide-pulsed DCs in the presence of a cytokine cocktail; (viii) repeating the T cell stimulation with fresh peptide-pulsed DCs or other peptide-pulsed antigen presenting cells in the presence of a cytokine cocktail; and (ix) harvesting the T-cell subpopulation, (x) characterizing the T-cell subpopulation as described herein; and (xi) banking the T-cell subpopulation for future use in a TVM composition.

[0132] In another aspect, the present invention includes a method of isolating and expanding a homogeneous mesenchymal stem cell population of the present invention comprising i) collecting bone marrow from a donor; ii) priming and coating the cell expansion set in the bioreactor; iii) loading bone marrow into the bioreactor; iv) feeding the MSCs; v) harvesting MSCs; vi) performing additional passages; and vii) cryopreservation.

[0133] In a further aspect, the present invention includes a bank of isolated T-cell and mesenchymal stem cell subpopulations. The T-cell and mesenchymal stem cell subpopulations are characterized, the characterization is recorded in a database for future use, and the T-cell subpopulations cryopreserved. The T-cell subpopulation has been characterized by, for example, HLA-phenotype, its specificity to its specific TAA or VAA, the epitope or epitopes each T-cell subpopulation is specific to, which MHC Class I and Class II the T-cell subpopulation is restricted to, antigenic activity through the T-cell's corresponding HLA-allele, and immune effector subtype concentration. The mesenchymal stem cell subpopulation has been characterized by, for example, donor source.

[0134] In some aspects, as described above, the T-cell subpopulation and/or MSC population can be a newly produced T cell subpopulation and/or MSC population, that has yet to be banked,

### Summary of Embodiments for VM Composition, Use and Manufacture

[0135] In another aspect, the invention is a composition and method of treating a patient undergoing a HSCT due to a disorder other than a malignancy that includes:
[0136] i) determining the HLA subtype of the patient;
[0137] ii) identifying one or more viral associated antigens for targeting with one or more VAA-specific T-cell subpopulations;
[0138] iii) selecting at least one banked T-cell subpopulation having the highest activity against each targeted VAA through one or more HLA-alleles shared between the patient and the VAA T-cell subpopulations, wherein each T-cell subpopulation is specific for multiple virus associated antigens, wherein each of the T-cell subpopulations are primed and expanded ex vivo;
[0139] iv) selecting at least one banked mesenchymal stem cell population;
[0140] v) combining each selected banked T-cell subpopulation and MSC population to create a VM composition;
[0141] vi) administering an effective amount of the VM composition to the patient; and,
[0142] vii) repeating the administration of the VM composition as necessary.
   In some embodiments, the shared HLA alleles are selected from one or more of HLA-A, HLA-B, or HLA-DR. In some embodiments, the VM composition is administered concomitantly with the HSCT. In some embodiments, the VM composition is administered following HSCT.

[0143] In a typical embodiment, a patient, such as a human, is infused or injected with an effective dose of a VM composition ranging from 1×10⁶ to 1×10⁸ cells/m² of a multi-VAA T-cell subpopulation, and 1-5×10⁶/kg of a MSC population. Alternatively, the cell subpopulations of the VM composition are not combined into a single dosage form, but rather each cell population is administered separately. The patient may receive a second or additional infusion or injection up to 1, 2, 3 or more weeks later if recommended by the health care practitioner and may receive additional doses subsequent thereto as useful and recommended.

[0144] The viral T-cells for the VM composition can be primed and activated using a number of known procedures, including but limited to the below process:
[0145] i) identifying eligible donors who are negative to the patient's disease, and preferably healthy, and wherein the donor can be cord blood or PBMCs;
[0146] ii) collecting the mononuclear cells from the negative donor and optionally removing any effector or other memory T-cells optionally based on CD45RA⁻, CD45RO⁺, CCR7⁻, CD62L⁻, CCR7⁺, and/or CD62L⁺ markers;
[0147] iii) separating the mononuclear cells into two components;
[0148] iv) separating the cells in the first component into nonadherent T-cells and precursors and adherent dendritic cells and precursors, using any method known in the art, for example exposure to a solid medium, separation magnetically, use of antibodies, etc., and if not done already, optionally removing any effector or other memory T-cells optionally based on CD45RA−, CD45RO+, CCR7, CD62L−, or CCR7+, CD62L+ markers;
[0149] v) differentiating monocytes and precursors to dendritic cells with IL-4 and GM-CSF, followed by treatment with maturing cytokines such as LPS, TNFα, IL-1β, IL-4, IL-6 and GM-CSF and then pulsing with one or more peptide(s) and/or epitope(s) from single or multiple selected VAAs; and then irradiating to form dendritic antigen presenting cells (APCs);
[0150] vi) treating the nonadherent T-cells and precursors with cytokines IL-7 and IL-15 to polarize to Th1 cells (and in some embodiments, without the use of IL-12);
[0151] vii) mixing the dendritic antigen presenting cells from (v) with the non-adherent T-cells and T-cell precursor cells from (vi) in the presence of cytokines IL-6, optionally in a ratio of between 5:1 and 20:1 of (vi) to (v) to produce a T-cell subpopulation specific for a single TAA or VAA;
[0152] viii) treating the second component of mononuclear cells with a mitogen such as PHA, a T-blast, B-blast, lymphoblastic cell or CD3/CD28 Blast optionally in the presence of IL-2 to produce activated T-cells; and then irradiating the cells to inhibit growth;
[0153] ix) pulsing the PHA blasts in (viii) with selected antigenic peptide(s) and/or epitope(s) from the selected tumor-associated antigens and irradiating to inhibit growth;
[0154] x) mixing the antigen specific T-cells from (vii) with the activated T-cell subpopulation from (ix) optionally in the presence of K562 accessory cells (preferably HLA-negative, K562 cells expressing CD80, CD83, CD86 and/or 4-IBBL) or LPS, and optionally IL-15 and/or IL-2;
[0155] xi) recovering the produced multi-antigen-specific T-cell subpopulation;
[0156] xii) optionally characterizing the resulting T-cell subpopulation for banking; and,
[0157] xiii) optionally cryopreserving and storing in the bank until use.

[0158] In the above process, unless specific steps are taken to remove cell components of the donor blood starting material, for example, removal based on cell surface markers, etc., the final T-cell subpopulation will normally also include a range of cell types, such as Natural Killer T-cells, γδ T-cells, CD4+ T-cells, CD8+ (cytotoxic) T-cells, and Natural Killer T-cells, among others, and may have naïve, and effector memory or central memory cells. The ratios of these cell types in the TVM composition will vary according to the donor's blood and processing conditions.

[0159] In another aspect, the present invention includes a method of manufacturing a T-cell subpopulation of the present invention comprising (i) collecting a mononuclear cell product from a healthy donor; (ii) determining the HLA subtype of the mononuclear cell product; (iii) separating the monocytes and the lymphocytes of the mononuclear cell product; (iv) generating and maturing dendritic cells (DCs) from the monocyte fraction; (v) pulsing the DCs with one or more peptides and/or epitopes from multiple VAAs; (vi) carrying out a CD45RA+ selection to isolate naïve lymphocytes from the lymphocyte fraction; (vii) stimulating the naïve lymphocytes with the peptide-pulsed DCs in the presence of a cytokine cocktail; (viii) repeating the T cell stimulation with fresh peptide-pulsed DCs or other peptide-pulsed antigen presenting cells in the presence of a cytokine cocktail; and (ix) harvesting the T-cell subpopulation, (x) characterizing the T-cell subpopulation as described herein; and (xi) banking the T-cell subpopulation for future use in a TVM composition.

[0160] In another aspect, the present invention includes a method of manufacturing a T-cell subpopulation of the present invention comprising (i) collecting a mononuclear cell product from a healthy donor; (ii) determining the HLA subtype of the mononuclear cell product; (iii) separating the monocytes and the lymphocytes of the mononuclear cell product; (iv) generating and maturing dendritic cells (DCs) from the monocyte fraction; (v) pulsing the DCs with one or more peptides and/or epitopes from multiple VAAs; (vi) carrying out a CD45RA+ selection to isolate naïve T cells from the lymphocyte fraction; (vii) stimulating the naïve T cells with the peptide-pulsed DCs in the presence of a cytokine cocktail; (viii) repeating the T cell stimulation with fresh peptide-pulsed DCs or other peptide-pulsed antigen presenting cells in the presence of a cytokine cocktail, creating a primed T cell subpopulation; and (ix) harvesting the primed T cell subpopulation, (x) characterizing the primed T cell subpopulation as described herein; and (xi) banking the primed T cell subpopulation for future use in a TVM composition.

[0161] In another aspect, the present invention includes a method of isolating and expanding a homogeneous mesenchymal stem cell population of the present invention comprising i) collecting bone marrow from a donor; ii) priming and coating the cell expansion set in the bioreactor; iii) loading bone marrow into the bioreactor; iv) feeding the MSCs; v) harvesting MSCs; vi) performing additional passages; and vii) cryopreservation.

[0162] In a further aspect, the present invention includes a bank of isolated T-cell and mesenchymal stem cell subpopulations. The T-cell and mesenchymal stem cell subpopulations are characterized, the characterization is recorded in a database for future use, and the T-cell subpopulations cryopreserved. The T-cell subpopulation has been characterized by, for example, HLA-phenotype, its specificity to its specific TAA or VAA, the epitope or epitopes each T-cell subpopulation is specific to, which MHC Class I and Class II the T-cell subpopulation is restricted to, antigenic activity through the T-cell's corresponding HLA-allele, and immune effector subtype concentration. The mesenchymal stem cell subpopulation has been characterized by, for example, donor source.

### DETAILED DESCRIPTION OF THE INVENTION

[0163] Complications of hematopoietic stem cell transplant (HSCT) can be reduced by administering to a patient in need thereof an effective amount of a cell therapy composition that includes in the same dosage form a multiplicity of T-cell and mesenchymal stem cell subpopulations as further described herein. In some embodiments, for the treatment of patients with a malignancy, the composition (“TVM”) and method comprises one or more T-cell subpopulations specific for multiple tumor-associated antigens (TAAs), one or more T-cell subpopulations specific for one or more virus-associated antigens (VAAs), and a mesenchymal stem cell population, wherein the TAA T-cell subpopulations that comprise the TVM composition for administration are chosen specifically based on the TAA expression profile of the patient's tumor. In another embodiment, for the treatment of patients undergoing HSCT for a disorder other than a malignancy, the composition (“VM”) and method comprises one or more T-cell subpopulations specific for one or more virus-associated antigens (VAAs), and a mesenchymal stem cell population.

### Definitions

[0164] Unless defined otherwise, all technical and scientific terms used herein have the same meaning as commonly understood by one of ordinary skill in the art to which the invention pertains.

[0165] The term “a” and “an” refers to one or to more than one (i.e., to at least one) of the grammatical object of the article. By way of example, “an element” means one element or more than one element.

[0166] The term “allogeneic” as used herein refers to medical therapy in which the donor and recipient are different individuals of the same species.

[0167] The term “antigen” as used herein refers to molecules, such as polypeptides, peptides, or glyco- or lipo-peptides that are recognized by the immune system, such as by the cellular or humoral arms of the human immune system. The term “antigen” includes antigenic determinants, including but not limited to peptides with lengths of 6, 7, 8, 9, 10, 11, 12, 13, 14, 15, 16, 17, 18, 19, 20, 21, 22 or more amino acid residues that bind to MHC molecules, form parts of MHC Class I or II complexes, or that are recognized when complexed with such molecules.

[0168] The term “antigen presenting cell (APC)” as used herein refers to a class of cells capable of presenting one or more antigens in the form of peptide-MHC complex recognizable by specific effector cells of the immune system, and thereby inducing an effective cellular immune response against the antigen or antigens being presented. Examples of professional APCs are dendritic cells and macrophages, though any cell expressing MHC Class I or II molecules can potentially present peptide antigen.

[0169] The term “autologous” as used herein refers to medical therapy in which the donor and recipient are the same person.

[0170] The term “cord blood” as used herein has its normal meaning in the art and refers to blood that remains in the placenta and umbilical cord after birth and contains hematopoietic stem cells. Cord blood may be fresh, cryopreserved, or obtained from a cord blood bank.

[0171] The term “cytokine” as used herein has its normal meaning in the art. Nonlimiting examples of cytokines used in the invention include IL-2, IL-6, IL-7, IL-12, IL-15, and IL-27.

[0172] The term “cytotoxic T-cell” or “cytotoxic T lymphocyte” as used herein is a type of immune cell that bears a CD8+ antigen and that can kill certain cells, including foreign cells, tumor cells, and cells infected with a virus. Cytotoxic T cells can be separated from other blood cells, grown ex vivo, and then given to a patient to kill tumor or viral cells. A cytotoxic T cell is a type of white blood cell and a type of lymphocyte.

[0173] The term “dendritic cell” or “DC” as used herein describes a diverse population of morphologically similar cell types found in a variety of lymphoid and non-lymphoid tissues, see Steinman, Ann. Rev. Immunol. 9:271-296 (1991).

[0174] The term “effector cell” as used herein describes a cell that can bind to or otherwise recognize an antigen and mediate an immune response. Tumor, virus, or other antigen-specific T-cells and NKT-cells are examples of effector cells.

[0175] The term “endogenous” as used herein refers to any material from or produced inside an organism, cell, tissue or system.

[0176] The term “epitope” or “antigenic determinant” as used herein refers to the part of an antigen that is recognized by the immune system, specifically by antibodies, B cells, or T cells.

[0177] The term “exogenous” as used herein refers to any material introduced from or produced outside an organism, cell, tissue or system.

[0178] The term “HLA” as used herein refers to human leukocyte antigen. There are 7,196 HLA alleles. These are divided into 6 HLA class I and 6 HLA class II alleles for each individual (on two chromosomes). The HLA system or complex is a gene complex encoding the major histocompatibility complex (MHC) proteins in humans. HLAs corresponding to MHC Class I (A, B, or C) present peptides from within the cell and activate CD8-positive (i.e., cytotoxic) T-cells. HLAs corresponding to MHC Class II (DP, DM, DOA, DOB, DQ and DR) stimulate the multiplication of CD4-positive T-cells) which stimulate antibody-producing B-cells.

[0179] The term “isolated” as used herein means separated from components in which a material is ordinarily associated with, for example, an isolated cord blood mononuclear cell can be separated from red blood cells, plasma, and other components of cord blood.

[0180] The terms “mesenchymal stem cell” and “mesenchymal stromal cell” as used herein are used interchangeably and are defined as a plastic-adherent cell population that can be directed to differentiate in vitro into cells of osteogenic, chondrogenic, adipogenic, myogenic, and other lineages. As part of their stem cell nature, MSCs proliferate and give rise to daughter cells that have the same pattern of gene expression and phenotype and, therefore, maintain the ‘sternness’ of the original cells.

[0181] A “naive” T-cell or other immune effector cell as used herein is one that has not been exposed to or primed by an antigen or to an antigen-presenting cell presenting a peptide antigen capable of activating that cell.

[0182] The term “passaging” as used herein is a technique that enables cells to be kept alive and growing under cultured conditions for extended periods of time. Passaging involves transferring some or all cells from a previous culture to fresh growth medium. Cells are generally passaged when they reach confluence.

[0183] A “peptide library” or “overlapping peptide library” as used herein within the meaning of the application is a complex mixture of peptides which in the aggregate covers the partial or complete sequence of a protein antigen. Successive peptides within the mixture overlap each other, for example, a peptide library may be constituted of peptides 15 amino acids in length which overlapping adjacent peptides in the library by 11 amino acid residues and which span the entire length of a protein antigen. Peptide libraries are commercially available and may be custom-made for particular antigens. Methods for contacting, pulsing or loading antigen-presenting cells are well known and incorporated by reference to Ngo, et al (2014), Peptide libraries may be obtained from JPT and are incorporated by reference to the website at https://www.jpt.com/products/peptrack/peptide-libraries.

[0184] A “peripheral blood mononuclear cell” or “PBMC” as used herein is any peripheral blood cell having a round nucleus. These cells consist of lymphocytes (T cells, B cells, NK cells) and monocytes. In humans, lymphocytes make up the majority of the PBMC population, followed by monocytes, and only a small percentage of dendritic cells.

[0185] The term “precursor cell” as used herein refers to a cell which can differentiate or otherwise be transformed into a particular kind of cell. For example, a “T-cell precursor cell” can differentiate into a T-cell and a “dendritic precursor cell” can differentiate into a dendritic cell.

[0186] A “subject” or “host” or “patient” as used herein is a vertebrate, preferably a mammal, more preferably a human. Mammals include, but are not limited to humans, simians, equines, bovines, porcines, canines, felines, murines, other farm animals, sport animals, or pets. Humans include those in need of virus- or other antigen-specific T-cells, such as those with lymphocytopenia, those who have undergone immune system ablation, those undergoing transplantation and/or immunosuppressive regimens, those having naïve or developing immune systems, such as neonates, or those undergoing cord blood or stem cell transplantation. In a typical embodiment, the term “patient” as used herein refers to a human.

[0187] A “T-cell population” or “T-cell subpopulation” is intended to include thymocytes, immature T lymphocytes, mature T lymphocytes, resting T lymphocytes and activated T-lymphocytes. The T-cell population or subpopulation can include αβ T-cells, including CD4+ T-cells, CD8+ T cells, γδ T-cells, Natural Killer T-cells, or any other subset of T-cells.

[0188] The term “tumor-associated antigen expression profile” or “tumor antigen expression profile” as used herein, refers to a profile of expression levels of tumor-associated antigens within a malignancy or tumor. Tumor-associated antigen expression may be assessed by any suitable method known in the art including, without limitation, quantitative real time polymerase chain reaction (qPCR), cell staining, or other suitable techniques. Non-limiting exemplary methods for determining a tumor-associated antigen expression profile can be found in Ding et al., Cancer Bio Med (2012) 9: 73-76; Qin et al., Leukemia Research (2009) 33(3) 384-390; Weber et al., Leukemia (2009) 23: 1634-1642; Liu et al., J. Immunol (2006) 176: 3374-3382; Schuster et al., Int J Cancer (2004) 108: 219-227.

[0189] The terms “tumor-associated antigen” or “TAA” as used herein is an antigen that is highly correlated with certain tumor cells. They are not usually found, or are found to a lesser extent, on normal cells.

[0190] The term “TVM composition” as used herein refers to a composition comprising a multi-tumor-associated antigen T-cell population, a multi-virus-associated antigen T-cell population, and a mesenchymal stem cell population. For purposes herein, when referring to combining T-cell subpopulations and mesenchymal stem cell populations to comprise the TVM composition, combining is intended to include the situation wherein the different cell types are physically combined into a single dosage form, that is, a single composition. In alternative embodiments, the cell subpopulations are kept physically separated but administrated concomitantly and collectively comprise the TVM composition.

[0191] The terms “viral-associated antigen” or “VAA” as used herein is a toxin or other substance given off by a virus which causes an immune response in its host. Viral antigens are protein in nature, typically strain-specific, and can be closely associated with the virus particle. A viral antigen is a protein encoded by the viral genome. A viral protein is an antigen specified by the viral genome that can be detected by a specific immunological response.

[0192] The term “VM composition” as used herein refers to a composition comprising a multi-virus-associated antigen T-cell population and a mesenchymal stem cell population. For purposes herein, when referring to combining T-cell subpopulations and mesenchymal stem cell populations to comprise the VM composition, combining is intended to include the situation wherein the different cell types are physically combined into a single dosage form, that is, a single composition. In alternative embodiments, the cell subpopulations are kept physically separated but administrated concomitantly and collectively comprise the VM composition.

### Tumor-Associated Antigens

[0193] The TVM compositions for administration provided herein include a T-cell subpopulation specific for one or more TAAs. The careful selection of antigens for TVM composition therapy is critical to success. Antigens used for immunotherapy should be intentionally selected based on either uniqueness to tumor cells, greater expression in tumor cells as compared to normal cells, or ability of normal cells with antigen expression to be adversely affected without significant compromise to normal cells or tissue.

[0194] Tumor-associated antigens (TAA) can be loosely categorized as oncofetal (typically only expressed in fetal tissues and in cancerous somatic cells), oncoviral (encoded by tumorigenic transforming viruses), overexpressed/accumulated (expressed by both normal and neoplastic tissue, with the level of expression highly elevated in neoplasia), cancer-testis (expressed only by cancer cells and adult reproductive tissues such as testis and placenta), lineage-restricted (expressed largely by a single cancer histotype), mutated (only expressed by cancer as a result of genetic mutation or alteration in transcription), post-translationally altered (tumor-associated alterations in glycosylation, etc.), or idiotypic (highly polymorphic genes where a tumor cell expresses a specific “clonotype”, i.e., as in B cell, T cell lymphoma/leukemia resulting from clonal aberrancies). Although they are preferentially expressed by tumor cells, TAAs are sometimes found in normal tissues. However, their expression differs from that of normal tissues by their degree of expression in the tumor, alterations in their protein structure in comparison with their normal counterparts or by their aberrant subcellular localization within malignant or tumor cells.

[0195] Examples of oncofetal tumor associated antigens include Carcinoembryonic antigen (CEA), immature laminin receptor, and tumor-associated glycoprotein (TAG) 72. Examples of overexpressed/accumulated include BING-4, calcium-activated chloride channel (CLCA) 2, Cyclin B1, 9D7, epithelial cell adhesion molecule (Ep-Cam), EphA3, Her2/neu, telomerase, mesothelin, orphan tyrosine kinase receptor (ROR1), stomach cancer-associated protein tyrosine phosphatase 1 (SAP-1), and survivin.

[0196] Examples of cancer-testis antigens include the b melanoma antigen (BAGE) family, cancer-associated gene (CAGE) family, G antigen (GAGE) family, melanoma antigen (MAGE) family, sarcoma antigen (SAGE) family and X antigen (XAGE) family, CT9, CT10, NY-ESO-1, L antigen (LAGE) 1, Melanoma antigen preferentially expressed in tumors (PRAME), and synovial sarcoma X (SSX) 2. Examples of lineage restricted tumor antigens include melanoma antigen recognized by T cells-1/2 (Melan-A/MART-1/2), Gp100/pmel17, tyrosine-related protein (TRP) 1 and 2, P. polypeptide, melanocortin 1 receptor (MC1R), and prostate-specific antigen. Examples of mutated tumor antigens include β-catenin, breast cancer antigen (BRCA) 1/2, cyclin-dependent kinase (CDK) 4, chronic myelogenous leukemia antigen (CML) 66, fibronectin, p53, Ras, and TGF-βRII. An example of a post-translationally altered tumor antigen is mucin (MUC) 1. Examples of idiotypic tumor antigens include immunoglobulin (Ig) and T cell receptor (TCR).

[0197] In some embodiments, the antigen associated with the disease or disorder is selected from the group consisting of CD19, CD20, CD22, hepatitis B surface antigen, anti-folate receptor, CD23, CD24, CD30, CD33, CD38, CD44, EGFR, EGP-2, EGP-4, 0EPHa2, ErbB2, 3, or 4, FBP, fetal acetylcholine receptor, HMW-MAA, IL-22R-alpha, IL-13R-alpha, kdr, kappa light chain, Lewis Y, MUC16 (CA-125), PSCA, NKG2D Ligands, oncofetal antigen, VEGF-R2, PSMA, estrogen receptor, progesterone receptor, ephrinB2, CD123, CS-1, c-Met and/or biotinylated molecules, and/or molecules expressed by HIV, HCV, HBV or other pathogens.

[0198] Exemplary tumor antigens include at least the following: carcinoembryonic antigen (CEA) for bowel cancers; CA-125 for ovarian cancer; MUC1 or epithelial tumor antigen (ETA) or CA15-3 for breast cancer; tyrosinase or melanoma-associated antigen (MAGE) for malignant melanoma; and abnormal products of ras, p53 for a variety of types of tumors; alphafetoprotein for hepatoma, ovarian, or testicular cancer; beta subunit of hCG for men with testicular cancer; prostate specific antigen for prostate cancer; beta 2 microglobulin for multiple myeloma and in some lymphomas; CA19-9 for colorectal, bile duct, and pancreatic cancer; chromogranin A for lung and prostate cancer; TA90 for melanoma, soft tissue sarcomas, and breast, colon, and lung cancer. Examples of TAAs are known in the art, for example in N. Vigneron, “Human Tumor Antigens and Cancer Immunotherapy,” BioMed Research International, vol. 2015, Article ID 948501, 17 pages, 2015. doi:10.1155/2015/948501; Ilyas et al., J Immunol. (2015) Dec. 1; 195(11): 5117-5122; Coulie et al., Nature Reviews Cancer (2014) volume 14, pages 135-146; Cheever et al., Clin Cancer Res. (2009) Sep. 1; 15(17):5323-37, which are incorporated by reference herein in its entirety.

[0199] Examples of oncoviral TAAs include human papilloma virus (HPV) L1, E6 and E7, Epstein-Barr Virus (EBV) Epstein-Barr nuclear antigen (EBNA), EBV viral capsid antigen (VCA) Igm or IgG, EBV early antigen (EA), latent membrane protein (LMP) 1 and 2, hepatitis B surface antigen (HBsAg), hepatitis B e antigen (HBeAg), hepatitis B core antigen (HBcAg), hepatitis B×antigen (HB×Ag), hepatitis C core antigen (HCV core Ag), Human T-Lymphotropic Virus Type 1 core antigen (HTLV-1 core antigen), HTLV-1 Tax antigen, HTLV-1 Group specific (Gag) antigens, HTLV-1 envelope (Env), HTLV-1 protease antigens (Pro), HTLV-1 Tof, HTLV-1 Rof, HTLV-1 polymerase (Pro) antigen, Human T-Lymphotropic Virus Type 2 core antigen (HTLV-2 core antigen), HTLV-2 Tax antigen, HTLV-2 Group specific (Gag) antigens, HTLV-2 envelope (Env), HTLV-2 protease antigens (Pro), HTLV-2 Tof, HTLV-2 Rof, HTLV-2 polymerase (Pro) antigen, latency-associated nuclear antigen (LANA), human herpesvirus-8 (HHV-8) K8.1, Merkel cell polyomavirus large T antigen (LTAg), and Merkel cell polyomavirus small T antigen (sTAg).

[0200] Elevated expression of certain types of glycolipids, for example gangliosides, is associated with the promotion of tumor survival in certain types of cancers. Examples of gangliosides include, for example, GM1b, GD1c, GM3, GM2, GM1a, GD1a, GT1a, GD3, GD2, GD1b, GT1b, GQ1b, GT3, GT2, GT1c, GQ1c, and GP1c. Examples of ganglioside derivatives include, for example, 9-O-Ac-GD3, 9-O-Ac-GD2, 5-N-de-GM3, N-glycolyl GM3, NeuGcGM3, and fucosyl-GM1. Exemplary gangliosides that are often present in higher levels in tumors, for example melanoma, small-cell lung cancer, sarcoma, and neuroblastoma, include GD3, GM2, and GD2.

[0201] In addition to the TAAs described above, another class of TAAs is tumor-specific neoantigens, which arise via mutations that alter amino acid coding sequences (non-synonymous somatic mutations). Some of these mutated peptides can be expressed, processed and presented on the cell surface, and subsequently recognized by T cells. Because normal tissues do not possess these somatic mutations, neoantigen-specific T cells are not subject to central and peripheral tolerance, and also lack the ability to induce normal tissue destruction. See, e.g., Lu & Robins, Cancer Immunotherapy Targeting Neoantigens, Seminars in Immunology, Volume 28, Issue 1, February 2016, Pages 22-27, incorporated herein by reference.

[0202] As a non-limiting example, Wilms tumor gene (WT1) is found in post-natal kidney, pancreas, fat, gonads and hematopoietic stem cells. In healthy hematopoietic stem cells WT1 encodes a transcription factor, which regulates cell proliferation, cell death and differentiation. WT1 is overexpressed in Wilms tumor, soft tissue sarcomas, rhabdomyosarcoma, ovarian, and prostate cancers. The WT1 gene was initially identified as a tumor suppressor gene due to its inactivation in Wilms' tumor (nephroblastoma), the most common pediatric kidney tumor. However, recent findings have shown that WT1 acts as an oncogene in ovarian and other tumors. In addition, several studies have reported that high expression of WT1 correlates with the aggressiveness of cancers and a poor outcome in leukemia, breast cancer, germ-cell tumor, prostate cancer, soft tissue sarcomas, rhabdomyosarcoma and head and neck squamous cell carcinoma.

[0203] There are several studies describing WT1 expression in ovarian cancers. A positive expression has been primarily observed in serous adenocarcinoma, and WT1 is more frequently expressed in high-grade serous carcinoma, which stands-out from other sub-types due to its aggressive nature and because it harbors unique genetic alterations. Patients with WT1-positive tumors tend to have a higher grade and stage of tumor.

[0204] Preferentially expressed antigen of melanoma (PRAME), initially identified in melanoma, has been associated with other tumors including neuroblastoma, osteosarcoma, soft tissue sarcomas, head and neck, lung and renal cancer including Wilms tumor. In neuroblastoma and osteosarcoma, PRAME expression was associated with advanced disease and a poor prognosis. PRAME is also highly expressed in leukemic cells and its expression levels are correlated with relapse and remission. The function in healthy tissue is not well understood, although studies suggest PRAME is involved in proliferation and survival in leukemia cells.

Survivin is highly expressed during normal fetal development but is absent in most mature tissues. It is thought to regulate apoptosis and proliferation of hematopoietic stem cells. Overexpression of survivin has been reported in almost all human malignancies including bladder cancer, lung cancer, breast cancer, stomach, esophagus, liver, ovarian cancers and hematological cancers. Survivin has been associated with chemotherapy resistance, increased tumor recurrence and decreased survival.

[0205] In some embodiments, the TVM composition includes one or more T-cell subpopulations targeting WT1, PRAME, Survivin, NY-ESO-1, MAGE-A3, MAGE-A4, Pr3, Cyclin A1, SSX2, Neutrophil Elastase (NE), or a combination thereof. In some embodiments, the TVM composition includes T-cell subpopulations targeting WT1, PRAME, and Survivin.

### Viral-Associated Antigens

[0206] The TVM and VM compositions for administration provided herein include a T-cell subpopulation specific for one or more VAAs. Patients receiving HSCT are particularly susceptible to viral infections. A virus is a sub-micrometer particle that has DNA or RNA packed in a shell called capsid. Viral antigens protrude from the capsid and often fulfill important function in docking to the host cell, fusion, and injection of viral DNA/RNA. Antibody-based immune responses form a first layer of protection of the host from viral infection; however, in many cases a vigorous cellular immune response mediated by T-cells and NK-cells is required for effective viral clearance.

[0207] A viral antigen is a toxin or other substance given off by a virus which causes an immune response in its host. Viral antigens are protein in nature, strain-specific, and closely associated with the virus particle. A viral antigen is a protein encoded by the viral genome. A viral protein is an antigen specified by the viral genome that can be detected by a specific immunological response.

[0208] Each virus has its own viral-associated antigens. Examples of antigens to cytomegalovirus (CMV) include immediate-early protein 1 (IE-1), immediate-early protein 2 (IE-2), 65 kDa phosphoprotein (pp65). Examples of antigens to Epstein-Barr Virus (EBV) include the Epstein-Barr Nuclear Antigen (EBNA) family, which includes EBNA-leader protein (EBNA-LP), EBNA1, EBNA2, EBNA3a, EBNA3b, EBNA3c; latent membrane protein (LMP) family, which includes LMP1 and LMP2; envelope glycoprotein GP350/GP340; secreted protein BARF1; mRNA export factor EB2 (BMLF1); DNA polymerase processivity factor (BMRF1) and trans-activator protein (BZLF1). Examples of antigens to human adenovirus (HAdV) include the hexon protein of Human adenovirus 3 (HAdV-3) and the penton protein of Human adenovirus 5 (HAdV-5). Examples of antigens to BK polyomavirus include capsid protein VP-1, capsid protein VP-2, large T antigen, and small T antigen. Examples of antigens to Human herpesvirus 6 (HHV-6) include proteins U14, U54 and U90. Examples of antigens to respiratory syncytial virus (RSV) include the fusion glycoprotein (F), major surface glycoprotein G, small hydrophobic protein (SH), and nucleocapsid (N) protein. Examples of antigens to human influenza include matrix protein (MP) 1, matrix protein (MP) 2, nucleocapsid protein (NP) 1, neuroaminidase, hemagglutinin (HA). Examples of antigens to human papillomavirus (HPV) include protein E4, protein E5, protein E6, protein E7, late major capsid protein (L) 1, replication protein E1, and replication protein E2. Examples of antigens to human immunodeficiency virus (HIV) include envelope glycoprotein gp160 (Env), Gag polyprotein, Nef protein, and Pol polyprotein.

[0209] In some embodiments, the TVM or VM composition includes one or more T-cell subpopulations specific to the viral-associated antigens IE-1, pp65, EBNA1, LMP1, LMP2, Hexon, Penton, LT, VP-1, MP1, NP1, N, F, U14 and U90, or a combination thereof. In some embodiments, the TVM or VM compositions includes one or more T-cell subpopulations specific to at least one of the viral-associated antigens of CMV selected from IE-1 and pp65; at least one of the viral-associated antigens of EBV selected from EBNA1, LMP1, LMP2, BARF1 and BZLF1; at least one of the viral-associated antigens of AdV selected from Hexon and Penton; at least one of the viral-associated antigens of BK virus selected from LT and VP-1; at least one of the viral-associated antigens of parainfluenza selected from MP1 and NP1; at least one of the viral-associated antigens of RSV selected from N and F; and at least one of the viral-associated antigens from HHV6 selected from U14 and U90.

### Generation of Targeted Tumor-Associated Antigen Peptides for Use in Activating T-Cell Subpopulations

[0210] T-cell subpopulations targeting TAAs can be prepared by pulsing antigen presenting cells or artificial antigen presenting cells with a single peptide or epitope, several peptides or epitopes, or with overlapping peptide libraries of the selected antigen, that for example, include peptides that are about 7, 8, 9, 10, 11, 12, 13, 14, 15, 16 or more amino acids long and overlapping one another by 5, 6, 7, 8, 9, 10, 11 or more amino acids, in certain aspects. GMP-quality overlapping peptide libraries directed to a number of tumor-associated antigens are commercially available, for example, through JPT Technologies and/or Miltenyi Biotec. In particular embodiments, the peptides are 7, 8, 9, 10, 11, 12, 13, 14, 15, 16, 17, 18, 19, 20, 21, 22, 23, 24, 25, 26, 27, 28, 29, 30, 31, 32, 33, 34, or 35 or more amino acids in length, for example, and there is overlap of 5, 6, 7, 8, 9, 10, 11, 12, 13, 14, 15, 16, 17, 18, 19, 20, 21, 22, 23, 24, 25, 26, 27, 28, 29, 30, 31, 32, 33, or 34 amino acids in length.

[0211] The TAA-targeting T-cell component of the TVM can be prepared by using a multi-TAA priming and expanding approach wherein the T-cells are primed with a mastermix of one or more antigenic peptides from two or more TAAs. Alternatively, the TAA targeting T cell component of the TVM can be prepared by separately priming and expanding a T-cell subpopulation to each targeted TAA, and then combining the separately primed and activated T-cell subpopulations.

[0212] In some embodiments, the T-cell subpopulation is specific to one or more known epitopes of the targeted TAA. Much work has been done to determine specific epitopes of TAAs and the HLA alleles they are associated with. Non-limiting examples of specific epitopes of TAAs and the alleles they are associated with can be found in Kessler et al., J Exp Med. 2001 Jan. 1; 193(1):73-88; Oka et al. Immunogenetics. 2000 February; 51(2):99-107; Ohminami et al., Blood. 2000 Jan. 1; 95(1):286-93; Schmitz et al., Cancer Res. 2000 Sep. 1; 60(17):4845-9 and Bachinsky et al., Cancer Immun. 2005 Mar. 22; 5:6, which are each incorporated herein by reference.

[0213] In some embodiments, the TAA peptides used to prime and expand a T-cell subpopulation includes specifically selected HLA-restricted peptides generated by determining the HLA profile of the donor source, and including peptides derived from the targeted TAA that best match the donor's HLA type. By including specifically selected donor HLA-restricted peptides in the peptide mix for priming and expanding T-cell subpopulations, a T-cell subpopulation can be generated that provides greater TAA targeted activity through more than one donor HLA, improving potential efficacy of the T-cell subpopulation. In addition, by generating a T-cell subpopulation with TAA targeted activity through more than one donor HLA allele, a single donor T-cell subpopulation may be included in a TVM composition for multiple recipients with different HLA profiles by matching one or more donor HLAs showing TAA-activity. In some embodiments, the TAA peptides used to prime and expand a T-cell subpopulation are derived from HLA-restricted peptides selected from at least one or more of an HLA-A restricted peptide, HLA-B restricted peptide, or HLA-DR restricted peptide. In some embodiments, the HLA-restricted epitopes are specific to at least one or more of a cell donor's HLA-A alleles, HLA-B alleles, or HLA-DR alleles. In some embodiments, the HLA-restricted epitopes are specific to at least both of the donor's HLA-A alleles, at least both of the donor's HLA-B alleles, and at least both of the donor's HLA-DR alleles. In some embodiments, the HLA-A alleles are selected from a group comprising HLA-A*01, HLA-A*02:01, HLA-A*03, HLA-A*11:01, HLA-A*24:02, HLA-A*26, or HLA-A*68:01. In some embodiments, the HLA-B alleles are selected from a group comprising HLA-B*07:02, HLA-B*08, HLA-B*15:01 (B62), HLA-B*18, HLA-B*27:05, HLA-B*35:01, or HLA-B*58:02. In some embodiments, the HLA-DR alleles are selected from a group comprising HLA-DRB1*0101, HLA-DRB1*0301 (DR17), HLA-DRB1*0401 (DR4Dw4), HLA-DRB1*0701, HLA-DRB1*1101, or HLA-DRB1*1501 (DR2b). Suitable methods for generating HLA-restricted peptides from an antigen have been described in, for example, Rammensee, HG., Bachmann, J., Emmerich, N. et al., SYFPEITHI: database for MHC ligands and peptide motifs. Immunogenetics (1999) 50: 213. https://doi.org/10.1007/s0025100050595. In some embodiments, the mastermix of peptides includes both an overlapping peptide library and specifically selected HLA-restricted peptides generated by determining the HLA profile of the donor source.

[0214] This focused approach to activation can increase the effectiveness of the activated T-cell subpopulation, and ultimately, the TVM composition

[0215] WT-1 Antigenic Peptides

[0216] In some embodiments, the TVM composition includes WT-1 specific T-cells. WT1 specific T-cells can be generated as described below using one or more antigenic peptides to WT1. In some embodiments, the WT1 specific T-cells are generated using one or more antigenic peptides to WT1, or a modified or heteroclitic peptide derived from a WT1 peptide. In some embodiments, WT1 specific T-cells are generated using a WT1 antigen library comprising a pool of peptides (for example 15mers) containing amino acid overlap (for example 11 amino acids of overlap) between each sequence formed by scanning the protein amino acid sequence SEQ. ID. No. 1 (UniProtKB—P19544 (WT1_HUMAN)):

MGSDVRDLNALLPAVPSLGGGGGCALPVSGAAQWAPVLDFAPPGASAYGS
LGGPAPPPAPPPPPPPPPHSFIKQEPSWGGAEPHEEQCLSAFTVHFSGQF
TGTAGACRYGPFGPPPPSQASSGQARMFPNAPYLPSCLESQPAIRNQGYS
TVTEDGTPSYGHTPSHHAAQFPNHSFKHEDPMGQQGSLGEQQYSVPPPVY
GCHTPTDSCTGSQALLLRTPYSSDNLYQMTSQLECMTWNQMNLGATLKGV
AAGSSSSVKWTEGQSNHSTGYESDNHTTPILCGAQYRIHTHGVERGIQDV
RRVPGVAPTLVRSASETSEKRPFMCAYPGCNKRYFKLSHLQMHSRKHTGE
KPYQCDFKDCERRFSRSDQLKRHQRRHTGVKPFQCKTCQRKFSRSDHLKT
HTRTHTGKTSEKPFSCRWPSCQKKFARSDELVRHHNMHQRNMTKLQLAL

[0217] The antigenic library is commercially available, for example, from JPT (Product Code: PM-WT1: Pep Mix Human (WT1/WT33)). In some embodiments, the WT1 specific T-cells are generated using a commercially available overlapping antigenic library made up of WT1 peptides.

[0218] In some embodiments, the WT1 specific T-cells are generated using one or more antigenic peptides to WT1, or a modified or heteroclitic peptide derived from a WT1 peptide,

[0219] In some embodiments, the WT1 specific T-cells are generated with peptides that recognize class I MHC molecules. In some embodiments, the WT1 specific T-cells are generated with peptides that recognize class II MHC molecules. In some embodiments, the WT1 specific T-cells are generated with peptides that recognize both class I and class II MHC molecules.

[0220] In some embodiments, the WT1 peptides used to prime and expand a T-cell subpopulation includes specifically selected HLA-restricted peptides generated by determining the HLA profile of the donor source, and including peptides derived from WT1 that best match the donor's HLA. In some embodiments, the WT1 peptides used to prime and expand a T-cell subpopulation are derived from HLA-restricted peptides selected from at least one or more of an HLA-A restricted peptide, HLA-B restricted peptide, or HLA-DR restricted peptide. Suitable methods for generating HLA-restricted peptides from an antigen have been described in, for example, Rammensee, HG., Bachmann, J., Emmerich, N. et al., SYFPEITHI: database for MHC ligands and peptide motifs. Immunogenetics (1999) 50: 213. https://doi.org/10.1007/s002510050595.

[0221] As provided herein, the HLA profile of a donor cell source can be determined, and T-cell subpopulations targeting WT1 derived, wherein the T-cell subpopulation is primed and expanded using a group of peptides that are HLA-restricted to the donor's HLA profile. In certain embodiments, the T-cell subpopulation is exposed to a peptide mix that includes one or more HLA-A restricted, HLA-B restricted, and HLA-DR restricted peptides. In certain embodiments, the T-cell subpopulation is exposed to a peptide mix that includes HLA-A restricted, HLA-B restricted, and HLA-DR restricted peptides, wherein the HLA-A matched peptides are selected from the peptides of Tables 1-7, the HLA-B peptides are selected from the peptides of Tables 8-14, and the HLA-DR peptides are selected from the peptides of Tables 15-20. For example, if the donor cell source has an HLA profile that is HLA-A*01/*02:01; HLA-B*15:01/*18; and HLA-DRB1*0101/*0301, then the WT1 peptides used to prime and expand the WT1 specific T-cell subpopulation are restricted to the specific HLA profile, and may include the peptides identified in Table 1 (Seq. ID. Nos. 2-11) for HLA-A*01; Table 2 (Seq. ID. No. 12-21) for HLA-A*02:01; Table 10 (Seq. ID. No. 92-101) for HLA-B*15:01; Table 11 (Seq. ID. No. 102-111) for HLA-B*18; Table 15 (Seq. ID. No. 142-151) for HLA-DRB1*0101; and Table 16 (Seq. ID. No. 152-159) for HLA-DRB1*0301. In some embodiments, the mastermix of peptides includes both an overlapping peptide library and specifically selected HLA-restricted peptides generated by determining the HLA profile of the donor source.

[0222] In some embodiments, the WT1 HLA-restricted epitopes are specific to at least both of the donor's HLA-A alleles, at least both of the donor's HLA-B alleles, and at least both of the donor's HLA-DR alleles. In some embodiments, the WT1 HLA-A alleles are selected from a group comprising HLA-A*01, HLA-A*02:01, HLA-A*03, HLA-A*11:01, HLA-A*24:02, HLA-A*26, or HLA-A*68:01, and the corresponding WT1 HLA-restricted peptides are selected for: HLA-A*01 from Table 1; HLA-A*02:01 from Table 2; HLA-A*03 from Table 3; HLA-A*11:01 from Table 4; HLA-A*24:02 from Table 5; HLA-A*26 from Table 6; or HLA-A*68:01 from Table 7; or any combination thereof. In some embodiments, the WT1 HLA-B alleles are selected from a group comprising HLA-B*07:02, HLA-B*08, HLA-B*15:01 (B62), HLA-B*18, HLA-B*27:05, HLA-B*35:01, or HLA-B*58:02, and the corresponding WT1 HLA-restricted peptides are selected for: HLA-B*07:02 from Table 8; HLA-B*08 from Table 9; HLA-B*15:01 (B62) from Table 10; HLA-B*18 from Table 11; HLA-B*27:05 from Table 12; HLA-B*35:01 from Table 13, or HLA-B*58:02 from Table 14; or any combination thereof. In some embodiments, the WT1 HLA-DR alleles are selected from a group comprising HLA-DRB1*0101, HLA-DRB1*0301 (DR17), HLA-DRB1*0401 (DR4Dw4), HLA-DRB1*0701, HLA-DRB1*1101, or HLA-DRB1*1501 (DR2b) and the corresponding WT1 HLA-restricted peptides are selected for: HLA-DRB1*0101 from Table 15; HLA-DRB1*0301 (DR17) from Table 16; HLA-DRB1*0401 (DR4Dw4) from Table 17; HLA-DRB1*0701 from Table 18; HLA-DRB1*1101 from Table 19; or HLA-DRB1*1501 (DR2b) from Table 20; or any combination thereof.

TABLE 1
WT1 HLA-A*01 Epitope Peptides

| SEQ ID NO. | Sequence |
|---|---|
| 2 | TSEKRPFMCAY |
| 3 | STVTFDGTPSY |
| 4 | HTTPILCGAQY |
| 5 | ESQPAIRNQGY |
| 6 | GSQALLLRTPY |
| 7 | HSRKHTGEKPY |
| 8 | FTGTAGACRY |
| 9 | RTPYSSDNLY |
| 10 | TTPILCGAQY |
| 11 | VTFDGTPSY |

TABLE 2
WT1 HLA-A*02:01 Epitope Peptides

| SEQ ID NO. | Sequence |
|---|---|
| 12 | SLGGGGGCAL |
| 13 | NALLPAVPSL |
| 14 | AIRNQGYSTV |
| 15 | NMHQRNMTKL |
| 16 | ALLPAVPSL |
| 17 | DLNALLPAV |
| 18 | SLGEQQYSV |
| 19 | NLGATLKGV |
| 20 | NLYQMTSQL |
| 21 | ILCGAQYRI |

TABLE 3
WT1 HLA-A*03 Epitope Peptides

| SEQ ID NO. | Sequence |
|---|---|
| 22 | DVRRVPGVAP |
| 23 | ALLPAVPSLG |
| 24 | ALPVSGAAQW |
| 25 | AIRNQGYSTV |
| 26 | RHQRRHTGVK |
| 27 | GVFRGIQDVR |
| 28 | RVPGVAPTL |
| 29 | RIHTHGVFR |
| 30 | DVRRVPGVA |
| 31 | HQRRHTGVK |

TABLE 4
WT1 HLA-A*11:01 Epitope Peptides

| SEQ ID NO. | Sequence |
|---|---|
| 32 | CTGSQALLLR |
| 33 | GVFRGIQDVR |
| 34 | HTGVKPFQCK |
| 35 | RTHTGKTSEK |
| 36 | KTHTRTHTGK |
| 37 | RSASETSEKR |
| 38 | LSHLQMHSRK |
| 39 | FSCRWPSCQK |
| 40 | RSASETSEK |
| 41 | FSRSDQLKR |

TABLE 5
WT1 HLA-A*24:02 Epitope Peptides

| SEQ ID NO. | Sequence |
|---|---|
| 42 | AYPGCNKRYF |
| 43 | QYRIHTHGVF |
| 44 | AFTVHFSGQF |
| 45 | PPPPPPPHSF |
| 46 | PPPPPPHSFI |
| 47 | PYLPSCLESQ |
| 48 | DFKDCERRF |
| 49 | GCNKRYFKL |
| 50 | ALLPAVPSL |
| 51 | PPPPPPHSF |

TABLE 6
WT1 HLA-A*26 Epitopes Peptides

| SEQ ID NO. | Sequence |
|---|---|
| 52 | TVTFDGTPSY |
| 53 | DFAPPGASAY |
| 54 | EGQSNHSTGY |
| 55 | TTPILCGAQY |
| 56 | ETSEKRPFMC |
| 57 | DVRDLNALL |
| 58 | VTFDGTPSY |
| 59 | FTVHFSGQF |
| 60 | EKRPFMCAY |
| 61 | ETSEKRPFM |

TABLE 7
WT1 HLA-A*68:01 Epitope Peptides

| SEQ ID NO. | Sequence |
|---|---|
| 62 | GVFRGIQDVRR |
| 63 | TTPILCGAQYR |
| 64 | ELVRHHNMHQR |
| 65 | PSCLESQPAIR |
| 66 | CTGSQALLLR |
| 67 | GVFRGIQDVR |
| 68 | KTHTRTHTGK |
| 69 | LVRHHNMHQR |
| 70 | FTGTAGACR |
| 71 | RIHTHGVFR |

TABLE 8
WT1 HLA-B*07:02 Epitope Peptides

| SEQ ID NO. | Sequence |
|---|---|
| 72 | PPGASAYGSL |
| 73 | EPHEEQCLSA |
| 74 | LPSCLESQPA |
| 75 | PPPPPPHSFI |
| 76 | PPSQASSGQA |
| 77 | DPMGQQGSL |
| 78 | PPPPPHSFI |
| 79 | PPPPPPHSF |
| 80 | TPSHHAAQF |
| 81 | WPSCQKKFA |

TABLE 9
WT1 HLA-B*08 Epitope Peptides

| SEQ ID NO. | Sequence |
|---|---|
| 82 | KRYFKLSHL |
| 83 | GCNKRYFKL |
| 84 | KKFARSDEL |
| 85 | GATLKGVAA |
| 86 | RRFSRSDQL |
| 87 | MTKLQLAL |
| 88 | EPHEEQCL |
| 89 | ETSEKRPF |
| 90 | CNKRYFKL |
| 91 | RNMTKLQL |

TABLE 10
WT1 HLA-B*15:01 (B62) Epitope Peptides

| SEQ ID NO. | Sequence |
|---|---|
| 92 | QQYSVPPPVY |
| 93 | TVTFDGTPSY |
| 94 | QQGSLGEQQY |
| 95 | SQALLLRTPY |
| 96 | SQPAIRNQGY |
| 97 | FQCKTCQRKF |
| 98 | AQWAPVLDF |
| 99 | GQSNHSTGY |
| 100 | NQGYSTVTF |
| 101 | CLSAFTVHF |

TABLE 11
WT1 HLA-B*18 Epitope Peptides

| SEQ ID NO. | Sequence |
|---|---|
| 102 | HEEQCLSAF |
| 103 | SETSEKRPF |
| 104 | GEKPYQCDF |
| 105 | SEKPFSCRW |
| 106 | AEPHEEQCL |
| 107 | DVRDLNALL |
| 108 | QALLLRTPY |
| 109 | EEQCLSAF |
| 110 | ETSEKRPF |
| 111 | DELVRHHN |

TABLE 12
WT1 HLA-B*27:05 Epitope Peptides

| SEQ ID NO. | Sequence |
|---|---|
| 112 | RRVPGVAPTL |
| 113 | RRFSRSDQLK |
| 114 | CRWPSCQKKF |
| 115 | LRTPYSSDNL |
| 116 | RRFSRSDQL |
| 117 | KRYFKLSHL |
| 118 | RRHTGVKPF |
| 119 | FRGIQDVRR |
| 120 | CRWPSCQKK |
| 121 | ARSDELVRH |

TABLE 13
WT1 HLA-B*35:01 Epitope Peptides

| SEQ ID NO. | Sequence |
|---|---|
| 122 | PPGASAYGSL |
| 123 | PPPPPPPHSF |
| 124 | PPPPPPHSFI |
| 125 | TPYSSDNLY |
| 126 | QPAIRNQGY |
| 127 | DPMGQQGSL |
| 128 | TPILCGAQY |
| 129 | TPSHHAAQF |
| 130 | PPPPPPHSF |
| 131 | YPGCNKRYF |

TABLE 14
WT1 HLA-B*58:02 Epitope Peptides

| SEQ ID NO. | Sequence |
|---|---|
| 132 | ASETSEKRPF |
| 133 | QASSGQARMF |
| 134 | RTPYSSDNLY |
| 135 | DSCTGSQALL |
| 136 | ASSGQARMF |
| 137 | RVPGVAPTL |
| 138 | TSQLECMTW |
| 139 | HTHGVFRGI |
| 140 | RTPYSSDNL |
| 141 | RSDELVRHH |

TABLE 15
WT1 HLA-DRB1*0101 Epitope Peptides

| SEQ ID NO. | Sequence |
|---|---|
| 142 | ASAYGSLGGPAPPPA |
| 143 | GSDVRDLNALLPAVP |
| 144 | IQDVRRVPGVAPTLV |
| 145 | VRDLNALLPAVPSLG |
| 146 | GATLKGVAAGSSSSV |
| 147 | TVHFSGQFTGTAGAC |
| 148 | VRRVPGVAPTLVRSA |
| 149 | NKRYFKLSHLQMHSR |
| 150 | LPAVPSLGGGGGCAL |
| 151 | RDLNALLPAVPSLGG |

TABLE 16
WT1 HLA-DRB1*0301 Epitope Peptides

| SEQ ID NO. | Sequence |
|---|---|
| 152 | YSTVTFDGTPSYGHT |
| 153 | MGSDVRDLNALLPAV |
| 154 | YQCDFKDCERRFSRS |
| 155 | VPSLGGGGGCALPVS |
| 156 | VLDFAPPGASAYGSL |
| 157 | LYQMTSQLECMTWNQ |
| 158 | PTLVRSASETSEKRP |
| 159 | HHNMHQRNMTKLQLA |

TABLE 17
WT1 HLA-DRB1*0401 (DR4Dw4) Epitope Peptides

| SEQ ID NO. | Sequence |
|---|---|
| 160 | NKRYFKLSHLQMHSR |
| 161 | TVHFSGQFTGTAGAC |
| 162 | ARMFPNAPYLPSCLE |
| 163 | NQGYSTVTFDGTPSY |
| 164 | TPSYGHTPSHHAAQF |
| 165 | NHSFKHEDPMGQQGS |
| 166 | RTPYSSDNLYQMTSQ |
| 167 | SVKWTEGQSNHSTGY |
| 168 | STGYESDNHTTPILC |
| 169 | KRPFMCAYPGCNKRY |

TABLE 18
WT1 HLA-DRB1*0701 Epitope Peptides

| SEQ ID NO. | Sequence |
|---|---|
| 170 | TPSYGHTPSHHAAQF |
| 171 | TVTFDGTPSYGHTPS |
| 172 | LSAFTVHFSGQFTGT |
| 173 | TPTDSCTGSQALLLR |
| 174 | LKGVAAGSSSSVKWT |
| 175 | TVHFSGQFTGTAGAC |
| 176 | YSTVTFDGTPSYGHT |
| 177 | CGAQYRIHTHGVFRG |
| 178 | HGVFRGIQDVRRVPG |
| 179 | APTLVRSASETSEKR |

TABLE 19
WT1 HLA-DRB1*1101 Epitope Peptides

| SEQ ID NO. | Sequence |
|---|---|
| 180 | FRGIQDVRRVPGVAP |
| 181 | NKRYFKLSHLQMHSR |
| 182 | QCDFKDCERRFSRSD |
| 183 | STGYESDNHTTPILC |
| 184 | SCRWPSCQKKFARSD |
| 185 | AAQWAPVLDFAPPGA |
| 186 | ASAYGSLGGPAPPPA |
| 187 | PGVAPTLVRSASETS |
| 188 | QMNLGATLKGVAAGS |

TABLE 20
WT1 HLA-DRB1*1501 (DR2b) Epitope Peptides

| SEQ ID NO. | Sequence |
|---|---|
| 189 | WAPVLDFAPPGASAY |
| 190 | RPFMCAYPGCNKRYF |
| 191 | GSDVRDLNALLPAVP |
| 192 | NALLPAVPSLGGGGG |
| 193 | PPGASAYGSLGGPAP |
| 194 | EQCLSAFTVHFSGQF |
| 195 | TAGACRYGPFGPPPP |
| 196 | PSCLESQPAIRNQGY |
| 197 | WNQMNLGATLKGVAA |
| 198 | IQDVRRVPGVAPTLV |

[0223] PRAME Antigenic Peptides

[0224] In some embodiments, the TVM composition includes PRAME specific T-cells. PRAME specific T-cells can be generated as described below using one or more antigenic peptides to PRAME. In some embodiments, the PRAME specific T-cells are generated using one or more antigenic peptides to PRAME, or a modified or heteroclitic peptide derived from a PRAME peptide. In some embodiments, PRAME specific T-cells are generated using a PRAME antigen library comprising a pool of peptides (for example 15mers) containing amino acid overlap (for example 11 amino acids of overlap) between each Sequence formed by scanning the protein amino acid sequence SEQ. ID. No. 199 (UniProt KB—P78395) for human melanoma antigen preferentially expressed in tumors (PRAME):

MERRRLWGSIQSRYISMSVWTSPRRLVELAGQSLLKDEALAIAALELLP
RELFPPLFMAAFDGRHSQTLKAMVQAWPFTCLPLGVLMKGQHLHLETFK
AVLDGLDVLLAQEVRPRRWKLQVLDLRKNSHQDFWTVWSGNRASLYSFP
EPEAAQPMTKKRKVDGLSTEAEQPFIPVEVLVDLFLKEGACDELFSYLI
EKVKRKKNVLRLCCKKLKIFAMPMQDIKMILKMVQLDSIEDLEVTCTWK
LPTLAKFSPYLGQMINLRRLLLSHIHASSYISPEKEEQYIAQFTSQFLS
LQCLQALYVDSLFFLRGRLDQLLRHVMNPLETLSITNCRLSEGDVMHLS
QSPSVSQLSVLSLSGVMLTDVSPEPLQALLERASATLQDLVFDECGITD
DQLLALLPSLSHCSQLTTLSFYGNSISISALQSLLQHLIGLSNLTHVLY
PVPLESYEDIHGTLHLERLAYLHARLRELLCELGRPSMVWLSANPCPHC
GDRTFYDPEPILCPCFMPN

[0225] Overlapping antigenic libraries are commercially available, for example, from JPT (Product code: PM-OIP4 PepMix Human (Prame/OIP4)). In some embodiments, the PRAME specific T-cells are generated using a commercially available overlapping antigenic library made up of PRAME peptides.

[0226] In some embodiments, the PRAME specific T-cells are generated using one or more antigenic peptides to PRAME, or a modified or heteroclitic peptide derived from a PRAME peptide. In some embodiments, the PRAME specific T-cells are generated with peptides that recognize class I MHC molecules. In some embodiments, the PRAME specific T-cells are generated with peptides that recognize class II MHC molecules. In some embodiments, the PRAME specific T-cells are generated with peptides that recognize both class I and class II MHC molecules.

[0227] In some embodiments, the PRAME peptides used to prime and expand a T-cell subpopulation includes specifically selected HLA-restricted peptides generated by determining the HLA profile of the donor source, and including peptides derived from PRAME that best match the donor's HLA. In some embodiments, the PRAME peptides used to prime and expand a T-cell subpopulation are derived from HLA-restricted peptides selected from at least one or more of an HLA-A restricted peptide, HLA-B restricted peptide, or HLA-DR restricted peptide. Suitable methods for generating HLA-restricted peptides from an antigen have been described in, for example, Rammensee, HG., Bachmann, J., Emmerich, N. et al., SYFPEITHI: database for MHC ligands and peptide motifs. Immunogenetics (1999) 50: 213. https://doi.org/10.1007/s002510050595.

[0228] As provided herein, the HLA profile of a donor cell source can be determined, and T-cell subpopulations targeting PRAME derived, wherein the T-cell subpopulation is primed and expanded using a group of peptides that are HLA-restricted to the donor's HLA profile. In certain embodiments, the T-cell subpopulation is exposed to a peptide mix that includes one or more HLA-A restricted, HLA-B restricted, and HLA-DR restricted peptides. In certain embodiments, the T-cell subpopulation is exposed to a peptide mix that includes HLA-A restricted, HLA-B restricted, and HLA-DR restricted peptides, wherein the HLA-A matched peptides are selected from the peptides of Tables 21-27, the HLA-B peptides are selected from the peptides of Tables 28-34, and the HLA-DR peptides are selected from the peptides of Tables 35-40. For example, if the donor cell source has an HLA profile that is HLA-A*01/*02:01; HLA-B*15:01/*18; and HLA-DRB1*0101/*0301, then the PRAMS peptides used to prime and expand the PRAMS specific T-cell subpopulation are restricted to the specific HLA profile, and may include the peptides identified in Table 21 (Seq. ID. Nos. 200-209) for HLA-A*01; Table 22 (Seq. ID. No. 210-219) for HLA-A*02:01; Table 30 (Seq. ID. No. 289-298) for HLA-B*15:01; Table 31 (Seq. ID. No. 299-308) for HLA-B*18; Table 35 (Seq. ID. No. 339-348) for HLA-DRB1*0101; and Table 36 (Seq. ID. No. 349-358) for HLA-DRB1*0301. In some embodiments, the mastermix of peptides includes both an overlapping peptide library and specifically selected HLA-restricted peptides generated by determining the HLA profile of the donor source.

[0229] In some embodiments, the PRAME HLA-restricted epitopes are specific to at least both of the donor's HLA-A alleles, at least both of the donor's HLA-B alleles, and at least both of the donor's HLA-DR alleles. In some embodiments, the PRAMS HLA-A alleles are selected from a group comprising HLA-A*01, HLA-A*02:01, HLA-A*03, HLA-A*11:01, HLA-A*24:02, HLA-A*26, or HLA-A*68:01, and the corresponding PRAME HLA-restricted peptides are selected for: HLA-A*01 from Table 21; HLA-A*02:01 from Table 22; HLA-A*03 from Table 23; HLA-A*11:01 from Table 24; HLA-A*24:02 from Table 25; HLA-A*26 from Table 26; or HLA-A*68:01 from Table 27; or any combination thereof. In some embodiments, the PRAMS HLA-B alleles are selected from a group comprising HLA-B*07:02, HLA-B*08, HLA-B*15:01 (B62), HLA-B*18, HLA-B*27:05, HLA-B*35:01, or HLA-B*58:02, and the corresponding PRAME HLA-restricted peptides are selected for: HLA-B*07:02 from Table 28; HLA-B*08 from Table 29; HLA-B*15:01 (B62) from Table 30; HLA-B*18 from Table 31; HLA-B*27:05 from Table 32; HLA-B*35:01 from Table 33, or HLA-B*58:02 from Table 34; or any combination thereof. In some embodiments, the PRAME HLA-DR alleles are selected from a group comprising HLA-DRB1*0101, HLA-DRB1*0301 (DR17), HLA-DRB1*0401 (DR4Dw4), HLA-DRB1*0701, HLA-DRB1*1101, or HLA-DRB1*1501 (DR2b) and the corresponding PRAME HLA-restricted peptides are selected for: HLA-DRB1*0101 from Table 35; HLA-DRB1*0301 (DR17) from Table 36; HLA-DRB1*0401 (DR4Dw4) from Table 37; HLA-DRB1*0701 from Table 38; HLA-DRB1*1101 from Table 39; or HLA-DRB1*1501 (DR2b) from Table 40; or any combination thereof.

TABLE 21
PRAME HLA-A*01 Epitope Peptides

| SEQ ID NO. | Sequence |
|---|---|
| 200 | LTDVSPEPLQA |
| 201 | ITDDQLLALLP |
| 202 | HGTLHLERLAY |
| 203 | GTLHLERLAY |
| 204 | CSQLTTLSFY |
| 205 | LSLQCLQALY |
| 206 | PTLAKFSPY |
| 207 | LSNLTHVLY |
| 208 | WSGNRASLY |
| 209 | LSHIHASSY |

TABLE 22
PRAME HLA-A*02:01 Epitope Peptides

| SEQ ID NO. | Sequence |
|---|---|
| 210 | ALLERASATL |
| 211 | ALAIAALELL |
| 212 | SLSGVMLTDV |
| 213 | ALYVDSLFFL |
| 214 | QLLALLPSL |
| 215 | SLLQHLIGL |
| 216 | RLRELLCEL |
| 217 | YLHARLREL |
| 218 | ALAIAALEL |
| 219 | FLRGRLDQL |

TABLE 23
PRAME HLA-A*03 Epitope Peptides

| SEQ ID NO. | Sequence |
|---|---|
| 220 | HLIGLSNLTH |
| 221 | RLWGSIQSRY |
| 222 | KVKRKKNVLR |
| 223 | VLYPVPLESY |
| 224 | CLPLGVLMK |
| 225 | ELAGQSLLK |
| 226 | KLQVLDLRK |
| 227 | RLSEGDVMH |
| 228 | YLIEKVKRK |
| 229 | NVLRLCCKK |

TABLE 24
PRAME HLA-A*11:01 Epitope Peptides

| SEQ ID NO. | Sequence |
|---|---|
| 230 | KVKRKKNVLR |
| 231 | PMQDIKMILK |
| 232 | CTWKLPTLAK |
| 233 | AIAALELLPR |
| 234 | AVLDGLDVLL |
| 235 | FSYLIEKVKR |
| 236 | ELAGQSLLK |
| 237 | EVLVDLFLK |
| 238 | ASSYISPEK |
| 239 | ELFSYLIEK |

TABLE 25
PRAME HLA-A*24:02 Epitope Peptides

| SEQ ID NO. | Sequence |
|---|---|
| 240 | QYIAQFTSQF |
| 241 | AYLHARLREL |
| 242 | LFPPLFMAAF |
| 243 | KFSPYLGQMI |
| 244 | FFLRGRLDQL |
| 245 | VSPEPLQALL |
| 246 | SYEDIHGTL |
| 247 | PYLGQMINL |
| 248 | LYVDSLFFL |
| 249 | TFYDPEPIL |

TABLE 26
PRAME HLA-A*26 Epitope Peptides

| SEQ ID NO. | Sequence |
|---|---|
| 250 | ETFKAVLDGL |
| 251 | DVSPEPLQAL |
| 252 | ETLSITNCRL |
| 253 | EGACDELFSY |
| 254 | EKEEQYIAQF |
| 255 | SVSQLSVLSL |
| 256 | EVRPRRWKL |
| 257 | ETFKAVLDG |
| 258 | EVLVDLFLK |

TABLE 27
PRAME HLA-A*68:01 Epitope Peptides

| SEQ ID NO. | Sequence |
|---|---|
| 259 | DVLLAQEVRPR |
| 260 | EAAQPMTKKR |
| 261 | KVKRKKNVLR |
| 262 | EAAQPMTKK |
| 263 | EVLVDLFLK |
| 264 | ELFSYLIEK |
| 265 | ETLSITNCR |
| 266 | DVLLAQEVR |
| 267 | DSLFFLRGR |
| 268 | IAALELLPR |

TABLE 28
PRAME HLA-B*07:02 Epitope Peptides

| SEQ ID NO. | Sequence |
|---|---|
| 269 | RPRRWKLQVL |
| 270 | SPSVSQLSVL |
| 271 | LPSLSHCSQL |
| 272 | MPMQDIKMIL |
| 273 | LPRELFPPL |
| 274 | QPFIPVEVL |
| 275 | IPVEVLVDL |
| 276 | SPEPLQALL |
| 277 | RPRRWKLQV |
| 278 | RPSMVWLSA |

TABLE 29
PRAME HLA-B*08 Epitope Peptides

| SEQ ID NO. | Sequence |
|---|---|
| 279 | TKKRKVDGL |
| 280 | FLRGRLDQL |
| 281 | KVKRKKNVL |
| 282 | EVRPRRWKL |
| 283 | PRRWKLQVL |
| 284 | VLRLCCKKL |
| 285 | YLHARLREL |
| 286 | RLRELLCEL |
| 287 | HARLRELL |
| 288 | VKRKKNVL |

TABLE 30
PRAME HLA-B*15:01 (B62) Epitope Peptides

| SEQ ID NO. | Sequence |
|---|---|
| 289 | VLYPVPLESY |
| 290 | RLWGSIQSRY |
| 291 | GLSNLTHVLY |
| 292 | RLCCKKLKIF |
| 293 | LLSHIHASSY |
| 294 | TLHLERLAY |
| 295 | GQHLHLETF |
| 296 | SLQCLQALY |
| 297 | ALYVDSLFF |
| 298 | SQLTTLSFY |

TABLE 31
PRAME HLA-B*18 Epitope Peptides

| SEQ ID NO. | Sequence |
|---|---|
| 299 | DEALAIAAL |
| 300 | LELLPRELF |
| 301 | KEGACDELF |
| 302 | PEPILCPCF |
| 303 | VEVLVDLF |
| 304 | EEQYIAQF |
| 305 | LELLPREL |
| 306 | RELFPPLF |
| 307 | SEGDVMHL |
| 308 | LERASATL |

TABLE 32
PRAME HLA-B*27:05 Epitope Peptides

| SEQ ID NO. | Sequence |
|---|---|
| 309 | RRLWGSIQSR |
| 310 | RRWKLQVLDL |
| 311 | ERLAYLHARL |
| 312 | ARLRELLCEL |
| 313 | KRKKNVLRL |
| 314 | RRLLLSHIH |
| 315 | GRLDQLLRH |
| 316 | PRRWKLQVL |
| 317 | LRLCCKKLK |
| 318 | ERLAYLHAR |

TABLE 33
PRAME HLA-B*35:01 Epitope Peptides

| SEQ ID NO. | Sequence |
|---|---|
| 319 | RPRRWKLQVL |
| 320 | SPSVSQLSVL |
| 321 | LPRELFPPLF |
| 322 | IPVEVLVDLF |
| 323 | MPMQDIKMIL |
| 324 | LPTLAKFSPY |
| 325 | IPVEVLVDL |
| 326 | LPRELFPPL |
| 327 | SPEPLQALL |
| 328 | QPFIPVEVL |

TABLE 34
PRAME HLA-B*58:02 Epitope Peptides

| SEQ ID NO. | Sequence |
|---|---|
| 329 | MSVWTSPRRL |
| 330 | AALELLPREL |
| 331 | KAVLDGLDVL |
| 332 | LAQEVRPRRW |
| 333 | ESYEDIHGTL |
| 334 | LSLQCLQALY |
| 335 | VSPEPLQALL |
| 336 | LSHCSQLTTL |
| 337 | KAMVQAWPF |
| 338 | KVKRKKNVL |

TABLE 35
PRAME HLA-DRB1*0101 Epitope Peptides

| SEQ ID NO. | Sequence |
|---|---|
| 339 | PRRLVELAGQSLLKD |
| 340 | LDGLDVLLAQEVRPR |
| 341 | FLSLQCLQALYVDSL |
| 342 | RHVMNPLETLSITNC |
| 343 | QLSVLSLSGVMLTDV |
| 344 | RRLWGSIQSRYISMS |
| 345 | EEQYIAQFTSQFLSL |
| 346 | DDQLLALLPSLSHCS |
| 347 | GVMLTDVSPEPLQAL |
| 348 | GQSLLKDEALAIAAL |

TABLE 36
PRAME HLA-DRB1*0301 (DR17) Epitope Peptides

| SEQ ID NO. | Sequence |
|---|---|
| 349 | ECGITDDQLLALLPS |
| 350 | LKMVQLDSIEDLEVT |
| 351 | LQALYVDSLFFLRGR |
| 352 | RRLVELAGQSLLKDE |
| 353 | IAALELLPRELFPPL |
| 354 | LGQMINLRRLLLSHI |
| 355 | FWTVWSGNRASLYSF |
| 356 | SSYISPEKEEQYIAQ |
| 357 | LAYLHARLRELLCEL |
| 358 | GQSLLKDEALAIAAL |

TABLE 37
PRAME HLA-DRB1*0401 (DR4Dw4)
Epitope Peptides

| SEQ ID NO. | Sequence |
|---|---|
| 359 | RRLWGSIQSRYISMS |
| 360 | RRLVELAGQSLLKDE |
| 361 | SYLIEKVKRKKNVLR |
| 362 | LGQMINLRRLLLSHI |
| 363 | EQYIAQFTSQFLSLQ |
| 364 | RGRLDQLLRHVMNPL |
| 365 | RHVMNPLETLSITNC |
| 366 | EGDVMHLSQSPSVSQ |
| 367 | LALLPSLSHCSQLTT |
| 368 | SISISALQSLLQHLI |

TABLE 38
PRAME HLA-DRB1*0701 Epitope Peptides

| SEQ ID NO. | Sequence |
|---|---|
| 369 | RRLWGSIQSRYISMS |
| 370 | IEDLEVTCTWKLPTL |
| 371 | GDVMHLSQSPSVSQL |
| 372 | MVQLDSIEDLEVTCT |
| 373 | LSFYGNSISISALQS |
| 374 | MAAFDGRHSQTLKAM |
| 375 | EEQYIAQFTSQFLSL |
| 376 | EQYIAQFTSQFLSLQ |
| 377 | RHVMNPLETLSITNC |
| 378 | LQALLERASATLQDL |

TABLE 39
PRAME HLA-DRB1*1101 Epitope Peptides

| SEQ ID NO. | Sequence |
|---|---|
| 379 | TWKLPTLAKFSPYLG |
| 380 | QSRYISMSVWTSPRR |
| 381 | AQPMTKKRKVDGLST |
| 382 | TSQFLSLQCLQALYV |
| 383 | MSVWTSPRRLVELAG |
| 384 | IAALELLPRELFPPL |
| 385 | CLPLGVLMKGQHLHL |
| 386 | QDFWTVWSGNRASLY |
| 387 | SYLIEKVKRKKNVLR |
| 388 | MQDIKMILKMVQLDS |

TABLE 40
PRAME HLA-DRB1*1501 (DR2b) Epitope Peptides

| SEQ ID NO. | Sequence |
|---|---|
| 389 | HLHLETFKAVLDGLD |
| 390 | PVPLESYEDIHGTLH |
| 391 | YISMSVWTSPRRLVE |
| 392 | PLFMAAFDGRHSQTL |
| 393 | LPTLAKFSPYLGQMI |
| 394 | EQYIAQFTSQFLSLQ |
| 395 | LTTLSFYGNSISISA |
| 396 | LAKFSPYLGQMINLR |
| 397 | MERRRLWGSIQSRYI |
| 398 | GSIQSRYISMSVWTS |

[0230] Survivin Antigenic Peptides

[0231] In some embodiments, the TVM composition includes survivin specific T-cells. survivin specific T-cells can be generated as described below using one or more antigenic peptides to Survivin. In some embodiments, the Survivin specific T-cells are generated using one or more antigenic peptides to Survivin, or a modified or heteroclitic peptide derived from a survivin peptide. In some embodiments, survivin specific T-cells are generated using a survivin antigen library comprising a pool of peptides (for example 15mers) containing amino acid overlap (for example 11 amino acids of overlap) between each sequence formed by scanning the protein amino acid sequence SEQ. ID. No. 399 (UniProt KB—O15392) for human baculoviral inhibitor of apoptosis repeat-containing 5 (Survivin):

MGAPTLPPAWQPFLKDHRISTFKNWPFLEGCACTPERMAEAGFIHCPTEN
EPDLQCFFCFKELEGWEPDDDPIEEHKKHSSGCAFLSVKKQFEELTLGEF
LKLDRERAKNKIAKETNNKKKEFEETAKKVRRAIEQLAAMD

[0232] Overlapping antigenic libraries are commercially available, for example, from JPT, for example, from JPT (Product Code: PM-Survivin (PepMix Human (Survivin)). In some embodiments, the survivin specific T-cells are generated using a commercially available overlapping antigenic library made up of survivin peptides.

[0233] In some embodiments, the survivin specific T-cells are generated using one or more antigenic peptides to survivin, or a modified or heteroclitic peptide derived from a Survivin peptide,

[0234] In some embodiments, the survivin specific T-cells are generated with peptides that recognize class I MHC molecules. In some embodiments, the survivin specific T-cells are generated with peptides that recognize class II MHC molecules. In some embodiments, the Survivin specific T-cells are generated with peptides that recognize both class I and class II MHC molecules.

[0235] In some embodiments, the survivin peptides used to prime and expand a T-cell subpopulation includes specifically selected HLA-restricted peptides generated by determining the HLA profile of the donor source, and including peptides derived from survivin that best match the donor's HLA. In some embodiments, the survivin peptides used to prime and expand a T-cell subpopulation are derived from HLA-restricted peptides selected from at least one or more of an HLA-A restricted peptide, HLA-B restricted peptide, or HLA-DR restricted peptide. Suitable methods for generating HLA-restricted peptides from an antigen have been described in, for example, Rammensee, HG., Bachmann, J., Emmerich, N. et al., SYFPEITHI: database for MHC ligands and peptide motifs. Immunogenetics (1999) 50: 213. https://doi.org/10.1007/s002510050595.

[0236] As provided herein, the HLA profile of a donor cell source can be determined, and T-cell subpopulations targeting survivin derived, wherein the T-cell subpopulation is primed and expanded using a group of peptides that are HLA-restricted to the donor's HLA profile. In certain embodiments, the T-cell subpopulation is exposed to a peptide mix that includes one or more HLA-A restricted, HLA-B restricted, and HLA-DR restricted peptides. In certain embodiments, the T-cell subpopulation is exposed to a peptide mix that includes HLA-A restricted, HLA-B restricted, and HLA-DR restricted peptides, wherein the HLA-A matched peptides are selected from the peptides of Tables 41-47, the HLA-B peptides are selected from the peptides of Tables 48-54, and the HLA-DR peptides are selected from the peptides of Tables 55-60. For example, if the donor cell source has an HLA profile that is HLA-A*01/*02:01; HLA-B*15:01/*18; and HLA-DRB1*0101/*0301, then the survivin peptides used to prime and expand the survivin specific T-cell subpopulation are restricted to the specific HLA profile, and may include the peptides identified in Table 41 (Seq. ID. Nos. 400-409) for HLA-A*01; Table 42 (Seq. ID. No. 410-419) for HLA-A*02:01; Table 50 (Seq. ID. No. 490-500) for HLA-B*15:01; Table 51 (Seq. ID. No. 501-510) for HLA-B*18; Table 55 (Seq. ID. No. 541-550) for HLA-DRB1*0101; and Table 56 (Seq. ID. No. 551-560) for HLA-DRB1*0301. In some embodiments, the mastermix of peptides includes both an overlapping peptide library and specifically selected HLA-restricted peptides generated by determining the HLA profile of the donor source.

[0237] In some embodiments, the survivin HLA-restricted epitopes are specific to at least both of the donor's HLA-A alleles, at least both of the donor's HLA-B alleles, and at least both of the donor's HLA-DR alleles. In some embodiments, the survivin HLA-A alleles are selected from a group comprising HLA-A*01, HLA-A*02:01, HLA-A*03, HLA-A*11:01, HLA-A*24:02, HLA-A*26, or HLA-A*68:01, and the corresponding survivin HLA-restricted peptides are selected for: HLA-A*01 from Table 41; HLA-A*02:01 from Table 42; HLA-A*03 from Table 43; HLA-A*11:01 from Table 44; HLA-A*24:02 from Table 45; HLA-A*26 from Table 46; or HLA-A*68:01 from Table 47; or any combination thereof. In some embodiments, the survivin HLA-B alleles are selected from a group comprising HLA-B*07:02, HLA-B*08, HLA-B*15:01 (B62), HLA-B*18, HLA-B*27:05, HLA-B*35:01, or HLA-B*58:02, and the corresponding survivin HLA-restricted peptides are selected for: HLA-B*07:02 from Table 48; HLA-B*08 from Table 49; HLA-B*15:01 (B62) from Table 50; HLA-B*18 from Table 51; HLA-B*27:05 from Table 52; HLA-B*35:01 from Table 53, or HLA-B*58:02 from Table 54; or any combination thereof. In some embodiments, the survivin HLA-DR alleles are selected from a group comprising HLA-DRB1*0101, HLA-DRB1*0301 (DR17), HLA-DRB1*0401 (DR4Dw4), HLA-DRB1*0701, HLA-DRB1*1101, or HLA-DRB1*1501 (DR2b) and the corresponding survivin HLA-restricted peptides are selected for: HLA-DRB1*0101 from Table 55; HLA-DRB1*0301 (DR17) from Table 56; HLA-DRB1*0401 (DR4Dw4) from Table 57; HLA-DRB1*0701 from Table 58; HLA-DRB1*1101 from Table 59; or HLA-DRB1*1501 (DR2b) from Table 60; or any combination thereof.

TABLE 41
Survivin HLA-A*01 Epitope Peptides

| SEQ ID NO. | Sequence |
|---|---|
| 400 | PTENEPDLAQC |
| 401 | KLDRERAKNKI |
| 402 | LKDHRISTFKN |
| 403 | STFKNWPFLEG |
| 404 | DDDPIEEHKKH |
| 405 | PTENEPDLAQ |
| 406 | PTENEPDLA |
| 407 | LTLGEFLKL |
| 408 | LGEFLKLDR |
| 409 | KLDRERAKN |

TABLE 42
Survivin HLA-A*02:01 Epitope Peptides

| SEQ ID NO. | Sequence |
|---|---|
| 410 | TLPPAWQPFL |
| 411 | ELTLGEFLKL |
| 412 | FLKDHRISTF |
| 413 | LTLGEFLKL |
| 414 | KVRRAIEQL |
| 415 | RAIEQLAAM |
| 416 | STFKNWPFL |
| 417 | FLKDHRIST |
| 418 | SVKKQFEEL |
| 419 | TLGEFLKLD |

TABLE 43
Survivin HLA-A*03 Epitope Peptides

| SEQ ID NO. | Sequence |
|---|---|
| 420 | KLDRERAKNK |
| 421 | FLKDHRISTF |
| 422 | FLKLDRERAK |
| 423 | KIAKETNNKK |
| 424 | DLAQCFFCFK |
| 425 | ELTLGEFLK |
| 426 | KIAKETNNK |
| 427 | KVRRAIEQL |
| 428 | SGCAFLSVK |
| 429 | KLDRERAKN |

TABLE 44
Survivin HLA-A*11:01 Epitope Peptides

| SEQ ID NO. | Sequence |
|---|---|
| 430 | SSGCAFLSVK |
| 431 | DLAQCFFCFK |
| 432 | SGCAFLSVKK |
| 433 | TLGEFLKLDR |
| 434 | STFKNWPFLE |
| 435 | KLDRERAKNK |
| 436 | KIAKETNNKK |
| 437 | SSGCAFLSV |
| 438 | GCAFLSVKK |
| 439 | ELTLGEFLK |

TABLE 45
Survivin HLA-A24:02 Epitope Peptides

| SEQ ID NO. | Sequence |
|---|---|
| 440 | QFEELTLGEF |
| 441 | TLPPAWQPFL |
| 442 | PDLAQCFFCF |
| 443 | PTLPPAWQPF |
| 444 | NEPDLAQCFF |
| 445 | LSVKKQFEEL |
| 446 | ELTLGEFLKL |
| 447 | AFLSVKKQF |
| 448 | LTLGEFLKL |
| 449 | TLPPAWQPF |

TABLE 46
Survivin HLA-A*26 Epitope Peptides

| SEQ ID NO. | Sequence |
|---|---|
| 450 | ELTLGEFLKL |
| 451 | ENEPDLAQCF |
| 452 | ETAKKVRRAI |
| 453 | ETNNKKKEFE |
| 454 | ETNNKKKEF |
| 455 | ETAKKVRRA |
| 456 | KVRRAIEQL |
| 457 | STFKNWPFL |
| 458 | EELTLGEFL |
| 459 | SVKKQFEEL |

TABLE 47
Survivin HLA-A*68:01 Epitope Peptides

| SEQ ID NO. | Sequence |
|---|---|
| 460 | LTLGEFLKLDR |
| 461 | PAWQPFLKDHR |
| 462 | SSGCAFLSVKK |
| 463 | EFEETAKKVRR |
| 464 | ETAKKVRRAIE |
| 465 | DLAQCFFCFK |
| 466 | EETAKKVRR |
| 467 | ERAKNKIAK |
| 468 | ETAKKVRRA |
| 469 | ELTLGEFLK |

TABLE 48
Survivin HLA-B*07:02 Epitope Peptides

| SEQ ID NO. | Sequence |
|---|---|
| 470 | LPPAWQPFL |
| 471 | CPTENEPDL |
| 472 | EPDLAQCFF |
| 473 | APTLPPAWQ |
| 474 | QPFLKDHRI |
| 475 | KHSSGCAFL |
| 476 | LTLGEFLKL |
| 477 | WPFLEGCACT |
| 478 | TPERMAEAGF |
| 479 | CPTENEPDLA |

TABLE 49
Survivin HLA-B*08 Epitope Peptides

| SEQ ID NO. | Sequence |
|---|---|
| 480 | RAKNKIAKE |
| 481 | QPFLKDHRI |
| 482 | SVKKQFEEL |
| 483 | NNKKKEFEE |
| 484 | TAKKVRRAI |
| 485 | AKKVRRAI |
| 486 | FLSVKKQF |
| 487 | RAKNKIAK |
| 488 | RERAKNKI |
| 489 | VKKQFEEL |

Table 50
Survivin HLA-B*15:01 (B62) Epitope Peptides

| SEQ ID NO. | Sequence |
|---|---|
| 490 | FLKDHRISTF |
| 491 | KQFEELTLGE |
| 492 | TLPPAWQPFL |
| 493 | ELEGWEPDDD |
| 495 | TLGEFLKLDR |
| 496 | TLPPAWQPF |
| 497 | DLAQCFFCF |
| 498 | KQFEELTLG |
| 499 | FLKDHRIST |
| 500 | KVRRAIEQL |

TABLE 51
Survivin HLA-B*18 Epitope Peptides

| SEQ ID NO. | Sequence |
|---|---|
| 501 | EELTLGEFL |
| 502 | FEELTLGEF |
| 503 | NEPDLAQCF |
| 504 | PERMAEAGF |
| 505 | DLAQCFFCF |
| 506 | KELEGWEPD |
| 507 | EELTLGEF |
| 508 | EEHKKHSS |
| 509 | KELEGWEP |
| 510 | KQFEELTL |

TABLE 52
Survivin HLA-B*27:05 Epitope Peptides

| SEQ ID NO. | Sequence |
|---|---|
| 511 | RRAIEQLAAM |
| 512 | GEFLKLDRER |
| 513 | ERMAEAGFIH |
| 514 | ERAKNKIAKE |
| 515 | KIAKETNNKK |
| 516 | ERAKNKIAK |
| 517 | DRERAKNKI |
| 518 | KEFEETAKK |
| 519 | ERMAEAGFI |
| 520 | GCAFLSVKK |

TABLE 53
Survivin HLA-B*35:01 Epitope Peptides

| SEQ ID NO. | Sequence |
|---|---|
| 521 | TPERMAEAGF |
| 522 | LPPAWQPFLK |
| 523 | EPDDDPIEEH |
| 524 | LSVKKQFEEL |
| 525 | LPPAWQPFL |
| 526 | CPTENEPDL |
| 527 | EPDLAQCFF |
| 528 | QPFLKDHRI |
| 529 | TPERMAEAG |
| 530 | EPDDDPIEE |

TABLE 54
Survivin HLA-B*58:02 Epitope Peptides

| SEQ ID NO. | Sequence |
|---|---|
| 531 | ETAKKVRRAI |
| 532 | PTLPPAWQPF |
| 533 | ISTFKNWPFL |
| 534 | LSVKKQFEEL |
| 535 | TAKKVRRAI |
| 536 | RAIEQLAAM |
| 537 | KVRRAIEQL |
| 538 | ISTFKNWPF |
| 539 | LTLGEFLKL |
| 540 | GAPTLPPAW |

TABLE 55
Survivin HLA-DRB1*0101 Epitope Peptides

| SEQ ID NO. | Sequence |
|---|---|
| 541 | FFCFKELEGWEPDDD |
| 542 | FKNWPFLEGCACTPE |
| 543 | LGEFLKLDRERAKNK |
| 544 | NWPFLEGCACTPERM |
| 545 | KKQFEELTLGEFLKL |
| 546 | CTPERMAEAGFIHCP |
| 547 | FEELTLGEFLKLDRE |
| 548 | MGAPTLPPAWQPFLK |
| 549 | KKKEFEETAKKVRRA |
| 550 | AKKVRRAIEQLAAMD |

TABLE 56
Survivin HLA-DRB1*0301 (DR17) Epitope Peptides

| SEQ ID NO. | Sequence |
|---|---|
| 551 | GEFLKLDRERAKNKI |
| 552 | WQPFLKDHRISTFKN |
| 553 | APTLPPAWQPFLKDH |
| 554 | DHRISTFKNWPFLEG |
| 555 | FEELTLGEFLKLDRE |
| 556 | PIENEPDLAQCFFCF |
| 557 | QPFLKDHRISTFKNW |
| 558 | GCAFLSVKKQFEELT |
| 559 | ELTLGEFLKLDRERA |
| 560 | AKKVRRAIEQLAAMD |

TABLE 57
Survivin HLA-DRB1*0401 (DR4Dw4) Epitope Peptides

| SEQ ID NO. | Sequence |
|---|---|
| 561 | WQPFLKDHRISTFKN |
| 562 | LGEFLKLDRERAKNK |
| 563 | APTLPPAWQPFLKDH |
| 564 | KNKIAKETNNKKKEF |
| 565 | DHRISTFKNWPFLEG |
| 566 | GEFLKLDRERAKNKI |
| 567 | FLKLDRERAKNKIAK |
| 568 | AKKVRRAIEQLAAMD |
| 569 | FLKDHRISTFKNWPF |
| 570 | RMAEAGFIHCPTENE |

TABLE 58
Survivin HLA-DRB1*0701 Epitope Peptides

| SEQ ID NO. | Sequence |
|---|---|
| 571 | AKKVRRAIEQLAAMD |
| 572 | APTLPPAWQPFLKDH |
| 573 | DHRISTFKNWPFLEG |
| 574 | LEGCACTPERMAEAG |
| 575 | EAGFIHCPTENEPDL |
| 576 | KKEFEETAKKVRRAI |
| 577 | AQCFFCFKELEGWEP |
| 578 | QCFFCFKELEGWEPD |
| 579 | LEGWEPDDDPIEEHK |
| 580 | KKQFEELTLGEFLKL |

TABLE 59
Survivin HLA-DRB1*1101 Epitope Peptides

| SEQ ID NO. | Sequence |
|---|---|
| 581 | LGEFLKLDRERAKNK |
| 582 | GCAFLSVKKQFEELT |
| 583 | FFCFKELEGWEPDDD |
| 584 | DDPIEEHKKHSSGCA |
| 585 | KKEFEETAKKVRRAI |
| 586 | PPAWQPFLKDHRIST |
| 587 | WQPFLKDHRISTFKN |
| 588 | AWQPFLKDHRISTFK |
| 589 | AQCFFCFKELEGWEP |
| 590 | ISTFKNWPFLEGCAC |

TABLE 60
Survivin HLA-DRB1*1501 (DR2b) Epitope Peptides

| SEQ ID NO. | Sequence |
|---|---|
| 591 | LGEFLKLDRERAKNK |
| 592 | GCAFLSVKKQFEELT |
| 593 | FFCFKELEGWEPDDD |
| 594 | DDPIEEHKKHSSGCA |
| 595 | KKEFEETAKKVRRAI |
| 596 | PPAWQPFLKDHRIST |
| 597 | WQPFLKDHRISTFKN |
| 598 | AWQPFLKDHRISTFK |
| 599 | AQCFFCFKELEGWEP |
| 600 | ISTFKNWPFLEGCAC |

[0238] NY-ESO-1 Antigenic Peptides

[0239] In some embodiments, the TVM composition includes NY-ESO-1 (cancer/testis antigen 1) specific T-cells. NY-ESO-1 specific T-cells can be generated as described below using one or more antigenic peptides to NY-ESO-1. In some embodiments, the NY-ESO-1 specific T-cells are generated using one or more antigenic peptides to NY-ESO-1, or a modified or heteroclitic peptide derived from a NY-ESO-1 peptide. In some embodiments, NY-ESO-1 specific T-cells are generated using a NY-ESO-1 antigen library comprising a pool of peptides (for example 15mers) containing amino acid overlap (for example 11 amino acids of overlap) between each sequence formed by scanning the protein amino acid sequence SEQ. ID. No. 601 (UniProt KB—P78358) for NY-ESO-1:

MQAEGRGTGGSTGDADGPGGPGIPDGPGGNAGGPGEAGATGGRGPRGAG
AARASGPGGGAPRGPHGGAASGLNGCCRCGARGPESRLLEFYLAMPFAT
PMEAELARRSLAQDAPPLPVPGVLLKEFTVSGNILTIRLTAADHRQLQL
SISSCLQQLSLLMWITQCFLPVFLAQPPSGQRR.

[0240] Overlapping antigenic libraries are commercially available, for example, from JPT, for example, from JPT (Product Code: PM-NYE (PepMix Human (NY-ESO-1)). In some embodiments, the NY-ESO-1 specific T-cells are generated using a commercially available overlapping antigenic library made up of NY-ESO-1 peptides.

[0241] In some embodiments, the NY-ESO-1 specific T-cells are generated using one or more antigenic peptides to NY-ESO-1, or a modified or heteroclitic peptide derived from a NY-ESO-1 peptide. In some embodiments, the NY-ESO-1 specific T-cells are generated with peptides that recognize class I MHC molecules. In some embodiments, the NY-ESO-1 specific T-cells are generated with peptides that recognize class II MHC molecules. In some embodiments, the NY-ESO-1 specific T-cells are generated with peptides that recognize both class I and class II MHC molecules.

[0242] In some embodiments, the NY-ESO-1 peptides used to prime and expand a T-cell subpopulation includes specifically selected HLA-restricted peptides generated by determining the HLA profile of the donor source, and including peptides derived from NY-ESO-1 that best match the donor's HLA. In some embodiments, the NY-ESO-1 peptides used to prime and expand a T-cell subpopulation are derived from HLA-restricted peptides selected from at least one or more of an HLA-A restricted peptide, HLA-B restricted peptide, or HLA-DR restricted peptide. Suitable methods for generating HLA-restricted peptides from an antigen have been described in, for example, Rammensee, HG., Bachmann, J., Emmerich, N. et al., SYFPEITHI: database for MHC ligands and peptide motifs. Immunogenetics (1999) 50: 213. https://doi.org/10.1007/s002510050595.

[0243] As provided herein, the HLA profile of a donor cell source can be determined, and T-cell subpopulations targeting NY-ESO-1 derived, wherein the T-cell subpopulation is primed and expanded using a group of peptides that are HLA-restricted to the donor's HLA profile. In certain embodiments, the T-cell subpopulation is exposed to a peptide mix that includes one or more HLA-A restricted, HLA-B restricted, and HLA-DR restricted peptides. In certain embodiments, the T-cell subpopulation is exposed to a peptide mix that includes HLA-A restricted, HLA-B restricted, and HLA-DR restricted peptides, wherein the HLA-A matched peptides are selected from the peptides of Tables 61-67, the HLA-B peptides are selected from the peptides of Tables 68-74, and the HLA-DR peptides are selected from the peptides of Tables 75-80. For example, if the donor cell source has an HLA profile that is HLA-A*01/*02:01; HLA-B*15:01/*18; and HLA-DRB1*0101/*0301, then the NY-ESO-1 peptides used to prime and expand the NY-ESO-1 specific T-cell subpopulation are restricted to the specific HLA profile, and may include the peptides identified in Table 61 (Seq. ID. Nos. 602-611) for HLA-A*01; Table 62 (Seq. ID. Nos. 612-621) for HLA-A*02:01; Table 70 (Seq. ID. Nos. 692-701) for HLA-B*15:01; Table 71 (Seq. ID. Nos. 702-711) for HLA-B*18; Table 75 (Seq. ID. Nos. 742-751) for HLA-DRB1*0101; and Table 76 (Seq. ID. Nos. 752-761) for HLA-DRB1*0301. In some embodiments, the mastermix of peptides includes both an overlapping peptide library and specifically selected HLA-restricted peptides generated by determining the HLA profile of the donor source.

[0244] In some embodiments, the NY-ESO-1 HLA-restricted epitopes are specific to at least both of the donor's HLA-A alleles, at least both of the donor's HLA-B alleles, and at least both of the donor's HLA-DR alleles. In some embodiments, the NY-ESO-1 HLA-A alleles are selected from a group comprising HLA-A*01, HLA-A*02:01, HLA-A*03, HLA-A*11:01, HLA-A*24:02, HLA-A*26, or HLA-A*68:01, and the corresponding NY-ESO-1 HLA-restricted peptides are selected for: HLA-A*01 from Table 61; HLA-A*02:01 from Table 62; HLA-A*03 from Table 63; HLA-A*11:01 from Table 64; HLA-A*24:02 from Table 65; HLA-A*26 from Table 66; or HLA-A*68:01 from Table 67; or any combination thereof. In some embodiments, the NY-ESO-1 HLA-B alleles are selected from a group comprising HLA-B*07:02, HLA-B*08, HLA-B*15:01 (B62), HLA-B*18, HLA-B*27:05, HLA-B*35:01, or HLA-B*58:02, and the corresponding NY-ESO-1 HLA-restricted peptides are selected for: HLA-B*07:02 from Table 68; HLA-B*08 from Table 69; HLA-B*15:01 (B62) from Table 70; HLA-B*18 from Table 71; HLA-B*27:05 from Table 72; HLA-B*35:01 from Table 73, or HLA-B*58:02 from Table 74; or any combination thereof. In some embodiments, the NY-ESO-1 HLA-DR alleles are selected from a group comprising HLA-DRB1*0101, HLA-DRB1*0301 (DR17), HLA-DRB1*0401 (DR4Dw4), HLA-DRB1*0701, HLA-DRB1*1101, or HLA-DRB1*1501 (DR2b) and the corresponding NY-ESO-1 HLA-restricted peptides are selected for: HLA-DRB1*0101 from Table 75; HLA-DRB1*0301 (DR17) from Table 76; HLA-DRB1*0401 (DR4Dw4) from Table 77; HLA-DRB1*0701 from Table 78; HLA-DRB1*1101 from Table 79; or HLA-DRB1*1501 (DR2b) from Table 80; or any combination thereof.

TABLE 61
NYESO1 HLA-A*01 Epitope Peptides

| SEQ ID NO. | Sequence |
|---|---|
| 602 | RGPESRLLEFY |
| 603 | AADHRQLQLSI |
| 604 | EAELARRSLAQ |
| 605 | GPESRLLEFY |
| 606 | AQDAPPLPVP |
| 607 | AADHRQLQLS |
| 608 | EAELARRSLA |
| 609 | PESRLLEFY |
| 610 | AQDAPPLPV |
| 611 | AADHRQLQL |

TABLE 62
NYESO1 HLA-A*02:01 Epitope Peptides

| SEQ ID NO. | Sequence |
|---|---|
| 612 | LLMWITQCFL |
| 613 | DAPPLPVPGV |
| 614 | RLLEFYLAMP |
| 615 | FTVSGNILTI |
| 616 | QLQLSISSCL |
| 617 | SLAQDAPPL |
| 618 | SISSCLQQL |
| 619 | RLLEFYLAM |
| 620 | TVSGNILTI |
| 621 | LMWITQCFL |

TABLE 63
NYESO1 HLA-A*03 Epitope Peptides

| SEQ ID NO. | Sequence |
|---|---|
| 622 | PLPVPGVLLK |
| 623 | RLLEFYLAMP |
| 624 | ELARRSLAQD |
| 625 | TIRLTAADHR |
| 626 | RLTAADHRQL |
| 627 | QLSISSCLQQ |
| 628 | FLAQPPSGQR |
| 629 | TIRLTAADH |
| 630 | RLLEFYLAM |
| 631 | ELARRSLAQ |

TABLE 64
NYESO1 HLA-A*11:01 Epitope Peptides

| SEQ ID NO. | Sequence |
|---|---|
| 632 | ATPMEAELAR |
| 633 | PLPVPGVLLK |
| 634 | ASGPGGGAPR |
| 635 | TVSGNILTIR |
| 636 | GVLLKEFTVS |
| 637 | ASGLNGCCR |
| 638 | LPVPGVLLK |
| 639 | VSGNILTIR |
| 640 | FTVSGNILT |
| 641 | SSCLQQLSL |

TABLE 65
NYESO1 HLA-A*24:02 Epitope Peptides

| SEQ ID NO. | Sequence |
|---|---|
| 642 | PFATPMEAEL |
| 643 | PPLPVPGVLL |
| 644 | RGPESRLLEF |
| 645 | FYLAMPFATP |
| 646 | APPLPVPGVL |
| 647 | EFTVSGNIL |
| 648 | PPLPVPGVL |
| 649 | FYLAMPFAT |
| 650 | PLPVPGVLL |
| 651 | SCLQQLSLL |

TABLE 66
NYESO1 HLA-A*26 Epitope Peptides

| SEQ ID NO. | Sequence |
|---|---|
| 652 | PVPGVLLKEF |
| 653 | FTVSGNILTI |
| 654 | LSISSCLQQL |
| 655 | WITQCFLPVF |
| 656 | EFTVSGNIL |
| 657 | ITQCFLPVF |
| 658 | ESRLLEFYL |
| 659 | EAELARRSL |
| 660 | SISSCLQQL |
| 661 | TVSGNILTI |

TABLE 67
NYESO1 HLA-A*68:01 Epitope Peptides

| SEQ ID NO. | Sequence |
|---|---|
| 662 | ATPMEAELARR |
| 663 | FTVSGNILTIR |
| 664 | EAGATGGRGPR |
| 665 | LTIRLTAADHR |
| 666 | RASGPGGGAPR |
| 667 | TVSGNILTIR |
| 668 | ASGPGGGAPR |
| 669 | ATPMEAELAR |
| 670 | VSGNILTIR |
| 671 | PMEAELARR |

TABLE 68
NYESO1 HLA-B*07:02 Epitope Peptides

| SEQ ID NO. | Sequence |
|---|---|
| 672 | APRGPHGGAA |
| 673 | APPLPVPGVL |
| 674 | PPLPVPGVLL |
| 675 | GPHGGAASGL |
| 676 | GPRGAGAARA |
| 677 | APRGPHGGA |
| 678 | IPDGPGGNA |
| 679 | APPLPVPGV |
| 680 | PPLPVPGVL |
| 681 | GPGGPGIPD |

TABLE 69
NYESO1 HLA-B*08 Epitope Peptides

| SEQ ID NO. | Sequence |
|---|---|
| 682 | GPESRLLEF |
| 683 | AADHRQLQL |
| 684 | GARGPESRL |
| 685 | ESRLLEFYL |
| 686 | LLKEFTVSG |
| 687 | SLAQDAPPL |
| 688 | PLPVPGVLL |
| 689 | AELARRSL |
| 690 | LLKEFTVS |
| 691 | PLPVPGVL |

TABLE 70
NYESO1 HLA-B*15:01 (B62) Epitope Peptides

| SEQ ID NO. | Sequence |
|---|---|
| 692 | SLLMWITQCF |
| 693 | PVPGVLLKEF |
| 694 | LLEFYLAMPF |
| 695 | RLLEFYLAMP |
| 696 | VLLKEFTVSG |
| 697 | MQAEGRGTGG |
| 698 | ILTIRLTAAD |
| 699 | RQLQLSISSC |
| 700 | LLMWITQCF |
| 701 | LLKEFTVSG |

TABLE 71
NYESO1 HLA-B*18 Epitope Peptides

| SEQ ID NO. | Sequence |
|---|---|
| 702 | PESRLLEFY |
| 703 | LEFYLAMPF |
| 704 | MEAELARRS |
| 705 | ESRLLEFYL |
| 706 | VPGVLLKEF |
| 707 | ITQCFLPVF |
| 708 | PESRLLEF |
| 709 | AELARRSL |
| 710 | PGVLLKEF |
| 711 | MEAELARR |

TABLE 72
NYESO1 HLA-B*27:05 Epitope Peptides

| SEQ ID NO. | Sequence |
|---|---|
| 712 | SRLLEFYLAM |
| 713 | RGPESRLLEF |
| 714 | RSLAQDAPPL |
| 715 | GPHGGAASGL |
| 716 | RRSLAQDAPP |
| 717 | ARGPESRLL |
| 718 | IRLTAADHR |
| 719 | GARGPESRL |
| 720 | GRGTGGSTG |
| 721 | GATGGRGPR |

TABLE 73
NYESO1 HLA-B*35:01 Epitope Peptides

| SEQ ID NO. | Sequence |
|---|---|
| 722 | PPLPVPGVLL |
| 723 | GPESRLLEFY |
| 724 | GPHGGAASGL |
| 725 | APPLPVPGVL |
| 726 | MPFATPMEAE |
| 727 | PPLPVPGVL |
| 728 | GPESRLLEF |
| 729 | VPGVLLKEF |
| 730 | LQLSISSCL |
| 731 | LPVFLAQPP |

TABLE 74
NYESO1 HLA-B*58:02 Epitope Peptides

| SEQ ID NO. | Sequence |
|---|---|
| 732 | RSLAQDAPPL |
| 733 | GARGPESRLL |
| 734 | FTVSGNILTI |
| 735 | LSISSCLQQL |
| 736 | SSCLQQLSLL |
| 737 | VSGNILTIRL |
| 738 | ISSCLQQLSL |
| 739 | EAELARRSL |
| 740 | LTAADHRQL |
| 741 | ESRLLEFYL |

TABLE 75
NYESO1 HLA-DRB1*0101 Epitope Peptides

| SEQ ID NO. | Sequence |
|---|---|
| 742 | EFYLAMPFATPMEAE |
| 743 | SRLLEFYLAMPFATP |
| 744 | ATPMEAELARRSLAQ |
| 745 | GPGIPDGPGGNAGGP |
| 746 | LEFYLAMPFATPMEA |
| 747 | MPFATPMEAELARRS |
| 748 | LLMWITQCFLPVFLA |
| 749 | TQCFLPVFLAQPPSG |
| 750 | QCFLPVFLAQPPSGQ |
| 751 | YLAMPFATPMEAELA |

TABLE 76
NYESO1 HLA-DRB1*0301 (DR17) Epitope Peptides

| SEQ ID NO. | Sequence |
|---|---|
| 752 | LSLLMWITQCFLPVF |
| 753 | AMPFATPMEAELARR |
| 754 | QLSLLMWITQCFLPV |
| 755 | RRSLAQDAPPLPVPG |
| 756 | QLSISSCLQQLSLLM |
| 757 | SRLLEFYLAMPFATP |
| 758 | PLPVPGVLLKEFTVS |
| 759 | TIRLTAADHRQLQLS |
| 760 | HRQLQLSISSCLQQL |
| 761 | LMWITQCFLPVFLAQ |

TABLE 77
NYESO1 HLA-DRB1*0401 (DR4Dw4) Epitope Peptides

| SEQ ID NO. | Sequence |
|---|---|
| 762 | TIRLTAADHRQLQLS |
| 763 | LSLLMWITQCFLPVF |
| 764 | LLEFYLAMPFATPME |
| 765 | LKEFTVSGNILTIRL |
| 766 | ASGLNGCCRCGARGP |
| 767 | YLAMPFATPMEAELA |
| 768 | ATPMEAELARRSLAQ |
| 769 | PGVLLKEFTVSGNIL |
| 770 | GVLLKEFTVSGNILT |
| 771 | SGNILTIRLTAADHR |

TABLE 78
NYESO1 HLA-DRB1*0701 Epitope Peptides

| SEQ ID NO. | Sequence |
|---|---|
| 772 | HRQLQLSISSCLQQL |
| 773 | AMPFATPMEAELARR |
| 774 | VLLKEFTVSGNILTI |
| 775 | LKEFTVSGNILTIRL |
| 776 | FTVSGNILTIRLTAA |
| 777 | TIRLTAADHRQLQLS |
| 778 | QLSLLMWITQCFLPV |
| 779 | LSLLMWITQCFLPVF |
| 780 | YLAMPFATPMEAELA |
| 781 | SGNILTIRLTAADHR |

TABLE 79
NYESO1 HLA-DRB1*1101 Epitope Peptides

| SEQ ID NO. | Sequence |
|---|---|
| 782 | LEFYLAMPFATPMEA |
| 783 | TQCFLPVFLAQPPSG |
| 784 | ASGLNGCCRCGARGP |
| 785 | SGNILTIRLTAADHR |
| 786 | TIRLTAADHRQLQLS |
| 787 | MPFATPMEAELARRS |
| 788 | ATPMEAELARRSLAQ |
| 789 | TPMEAELARRSLAQD |
| 790 | PMEAELARRSLAQDA |
| 791 | LPVPGVLLKEFTVSG |

TABLE 80
NYESO1 HLA-DRB1*1501 (DR2b) Epitope Peptides

| SEQ ID NO. | Sequence |
|---|---|
| 792 | SRLLEFYLAMPFATP |
| 793 | QCFLPVFLAQPPSGQ |
| 794 | ESRLLEFYLAMPFAT |
| 795 | YLAMPFATPMEAELA |
| 796 | PGVLLKEFTVSGNIL |
| 797 | GVLLKEFTVSGNILT |
| 798 | QLSLLMWITQCFLPV |
| 799 | MWITQCFLPVFLAQP |
| 800 | LLEFYLAMPFATPME |
| 801 | LKEFTVSGNILTIRL |

[0245] MAGE A3 Antigenic Peptides

[0246] In some embodiments, the TVM composition includes MAGE-A3 (Melanoma-associated antigen 3) specific T-cells. MAGE-A3 specific T-cells can be generated as described below using one or more antigenic peptides to MAGE-A3. In some embodiments, the MAGE-A3 specific T-cells are generated using one or more antigenic peptides to MAGE-A3, or a modified or heteroclitic peptide derived from a MAGE-A3 peptide. In some embodiments, MAGE-A3 specific T-cells are generated using a MAGE-A3 antigen library comprising a pool of peptides (for example 15mers) containing amino acid overlap (for example 11 amino acids of overlap) between each sequence formed by scanning the protein amino acid sequence SEQ. ID. No. 802 (UniProt KB—P43357) for MAGE-A3:

MPLEQRSQHCKPEEGLEARGEALGLVGAQAPATEEQEAASSSSTLVEV
TLGEVPAAESPDPPQSPQGASSLPTTMNYPLWSQSYEDSSNQEEEGPS
TFPDLESEFQAALSRKVAELVHFLLLKYRAREPVTKAEMLGSVVGNWQ
YFFPVILLIIVLAIIAREGDCAPEEKIWEELSVLEVFEGREDSILGDP
KKLLTQHFVQENYLEYRQVPGSDPACYEFLWGPRALVETSYVKVLHHM
VKISGGPHISYPPLHEWVLREGEE.

[0247] Overlapping antigenic libraries are commercially available, for example, from JPT, for example, from JPT (Product Code: PM-MAGEA3 (PepMix Human (MAGE-A3)). In some embodiments, the MAGE-A3 specific T-cells are generated using a commercially available overlapping antigenic library made up of MAGE-A3 peptides.

[0248] In some embodiments, the MAGE-A3 specific T-cells are generated using one or more antigenic peptides to MAGE-A3, or a modified or heteroclitic peptide derived from a MAGE-A3 peptide. In some embodiments, the MAGE-A3 specific T-cells are generated with peptides that recognize class I MHC molecules. In some embodiments, the MAGE-A3 specific T-cells are generated with peptides that recognize class II MHC molecules. In some embodiments, the MAGE-A3 specific T-cells are generated with peptides that recognize both class I and class II MHC molecules.

[0249] In some embodiments, the MAGE-A3 peptides used to prime and expand a T-cell subpopulation includes specifically selected HLA-restricted peptides generated by determining the HLA profile of the donor source, and including peptides derived from MAGE-A3 that best match the donor's HLA. In some embodiments, the MAGE-A3 peptides used to prime and expand a T-cell subpopulation are derived from HLA-restricted peptides selected from at least one or more of an HLA-A restricted peptide, HLA-B restricted peptide, or HLA-DR restricted peptide. Suitable methods for generating HLA-restricted peptides from an antigen have been described in, for example, Rammensee, HG., Bachmann, J., Emmerich, N. et al., SYFPEITHI: database for MHC ligands and peptide motifs. Immunogenetics (1999) 50: 213. https://doi.org/10.1007/s002510050595.

[0250] As provided herein, the HLA profile of a donor cell source can be determined, and T-cell subpopulations targeting MAGE-A3 derived, wherein the T-cell subpopulation is primed and expanded using a group of peptides that are HLA-restricted to the donor's HLA profile. In certain embodiments, the T-cell subpopulation is exposed to a peptide mix that includes one or more HLA-A restricted, HLA-B restricted, and HLA-DR restricted peptides. In certain embodiments, the T-cell subpopulation is exposed to a peptide mix that includes HLA-A restricted, HLA-B restricted, and HLA-DR restricted peptides, wherein the HLA-A matched peptides are selected from the peptides of Tables 81-87, the HLA-B peptides are selected from the peptides of Tables 88-94, and the HLA-DR peptides are selected from the peptides of Tables 95-100. For example, if the donor cell source has an HLA profile that is HLA-A*01/*02:01; HLA-B*15:01/*18; and HLA-DRB1*0101/*0301, then the MAGE-A3 peptides used to prime and expand the MAGE-A3 specific T-cell subpopulation are restricted to the specific HLA profile, and may include the peptides identified in Table 81 (Seq. ID. Nos. 803-812) for HLA-A*01; Table 82 (Seq. ID. Nos. 813-822) for HLA-A*02:01; Table 90 (Seq. ID. Nos. 893-902) for HLA-B*15:01; Table 91 (Seq. ID. Nos. 903-912) for HLA-B*18; Table 95 (Seq. ID. Nos. 943-952) for HLA-DRB1*0101; and Table 96 (Seq. ID. Nos. 953-962) for HLA-DRB1*0301. In some embodiments, the mastermix of peptides includes both an overlapping peptide library and specifically selected HLA-restricted peptides generated by determining the HLA profile of the donor source.

[0251] In some embodiments, the MAGE-A3 HLA-restricted epitopes are specific to at least both of the donor's HLA-A alleles, at least both of the donor's HLA-B alleles, and at least both of the donor's HLA-DR alleles. In some embodiments, the MAGE-A3 HLA-A alleles are selected from a group comprising HLA-A*01, HLA-A*02:01, HLA-A*03, HLA-A*11:01, HLA-A*24:02, HLA-A*26, or HLA-A*68:01, and the corresponding MAGE-A3 HLA-restricted peptides are selected for: HLA-A*01 from Table 81; HLA-A*02:01 from Table 82; HLA-A*03 from Table 83; HLA-A*11:01 from Table 84; HLA-A*24:02 from Table 85; HLA-A*26 from Table 86; or HLA-A*68:01 from Table 87; or any combination thereof. In some embodiments, the MAGE-A3 HLA-B alleles are selected from a group comprising HLA-B*07:02, HLA-B*08, HLA-B*15:01 (B62), HLA-B*18, HLA-B*27:05, HLA-B*35:01, or HLA-B*58:02, and the corresponding MAGE-A3 HLA-restricted peptides are selected for: HLA-B*07:02 from Table 88; HLA-B*08 from Table 89; HLA-B*15:01 (B62) from Table 90; HLA-B*18 from Table 91; HLA-B*27:05 from Table 92; HLA-B*35:01 from Table 93, or HLA-B*58:02 from Table 94; or any combination thereof. In some embodiments, the MAGE-A3 HLA-DR alleles are selected from a group comprising HLA-DRB1*0101, HLA-DRB1*0301 (DR17), HLA-DRB1*0401 (DR4Dw4), HLA-DRB1*0701, HLA-DRB1*1101, or HLA-DRB1*1501 (DR2b) and the corresponding MAGE-A3 HLA-restricted peptides are selected for: HLA-DRB1*0101 from Table 95; HLA-DRB1*0301 (DR17) from Table 96; HLA-DRB1*0401 (DR4Dw4) from Table 97; HLA-DRB1*0701 from Table 98; HLA-DRB1*1101 from Table 99; or HLA-DRB1*1501 (DR2b) from Table 100; or any combination thereof.

TABLE 81
MAGEA3 HLA-A*01 Epitope Peptides

| SEQ ID NO. | Sequence |
|---|---|
| 803 | LMEVDPIGHLY |
| 804 | AELVHFLLLKY |
| 805 | QHFVQENYLEY |
| 806 | ASSLPTTMNY |
| 807 | ELVHFLLLKY |
| 808 | LTQHFVQENY |
| 809 | EVDPIGHLY |
| 810 | SSLPTTMNY |
| 811 | LVHFLLLKY |
| 812 | GSVVGNWQY |

TABLE 82
MAGEA3 HLA-A*02:01 Epitope Peptides

| SEQ ID NO. | Sequence |
|---|---|
| 813 | TLVEVTLGEV |
| 814 | ALVETSYVKV |
| 815 | GLLIIVLAII |
| 816 | AALSRKVAEL |
| 817 | LVFGIELMEV |
| 818 | ALSRKVAEL |
| 819 | LLIIVLAII |
| 820 | GLLIIVLAI |
| 821 | FLWGPRALV |
| 822 | KIWEELSVL |

TABLE 83
MAGEA3 HLA-A*03 Epitope Peptides

| SEQ ID NO. | Sequence |
|---|---|
| 823 | KYRAREPVTK |
| 824 | YVKVLHHMVK |
| 825 | QVPGSDPACY |
| 826 | LLGDNQIMPK |
| 827 | KLLTQHFVQE |
| 828 | FLWGPRALVE |
| 829 | ALVETSYVK |
| 830 | ALGLVGAQA |
| 831 | ELVHFLLLK |
| 832 | YRAREPVTK |

TABLE 84
MAGEA3 HLA-A*11:01 Epitope Peptides

| SEQ ID NO. | Sequence |
|---|---|
| 833 | ESEFQAALSR |
| 834 | YVKVLHHMVK |
| 835 | AELVHFLLLK |
| 836 | LIIVLAIIAR |
| 837 | ASSSSTLVEV |
| 838 | STLVEVTLGE |
| 839 | ELVHFLLLK |
| 840 | SVLEVFEGR |
| 841 | DSILGDPKK |
| 842 | ALVETSYVK |

TABLE 85
MAGEA3 HLA-A*24:02 Epitope Peptides

| SEQ ID NO. | Sequence |
|---|---|
| 843 | SYPPLHEWVL |
| 844 | LYIFATCLGL |
| 845 | VFEGREDSIL |
| 846 | KVAELVHFLL |
| 847 | TFPDLESEF |
| 848 | VFEGREDSI |
| 849 | EFLWGPRAL |
| 850 | VAELVHFLL |
| 851 | IFSKASSSL |
| 852 | AELVHFLLL |

TABLE 86
MAGEA3 HLA-A*26 Epitope Peptides

| SEQ ID NO. | Sequence |
|---|---|
| 853 | ELVHFLLLKY |
| 854 | EKIWEELSVL |
| 855 | EVFEGREDSI |
| 856 | EVTLGEVPAA |
| 857 | EVDPIGHLY |
| 858 | LVHFLLLKY |
| 859 | EVFEGREDS |
| 860 | KVAELVHFL |
| 861 | EPVTKAEML |
| 862 | SVVGNWQYF |

TABLE 87
MAGEA3 HLA-A*68:01 Epitope Peptides

| SEQ ID NO. | Sequence |
|---|---|
| 863 | LLIIVLAIIAR |
| 864 | ELVHFLLLKYR |
| 865 | ELSVLEVFEGR |
| 866 | LIIVLAIIAR |
| 867 | ESEFQAALSR |
| 868 | IIVLAIIAR |
| 869 | ELVHFLLLK |
| 870 | IVLAIIARE |
| 871 | SVLEVFEGR |
| 872 | DSILGDPKK |

TABLE 88
MAGEA3 HLA-B*07:02 Epitope Peptides

| SEQ ID NO. | Sequence |
|---|---|
| 873 | APEEKIWEEL |
| 874 | SPQGASSLPT |
| 875 | APATEEQEAA |
| 876 | DPIGHLYIFA |
| 877 | GPHISYPPL |
| 878 | LPTTMNYPL |
| 879 | EPVTKAEML |
| 880 | YPPLHEWVL |
| 881 | APATEEQEA |
| 882 | MPKAGLLII |

TABLE 89
MAGEA3 HLA-B*08 Epitope Peptides

| SEQ ID NO. | Sequence |
|---|---|
| 883 | ALSRKVAEL |
| 884 | EPVTKAEML |
| 885 | GLEARGEAL |
| 886 | LLKYRAREP |
| 887 | QIMPKAGLL |
| 888 | EARGEALGL |
| 889 | MPKAGLLII |
| 890 | LLKYRARE |
| 891 | QIMPKAGL |
| 892 | EEKIWEEL |

TABLE 90
MAGEA3 HLA-B*15:01 (B62) Epitope Peptides

| SEQ ID NO. | Sequence |
|---|---|
| 893 | NQEEEGPSTF |
| 894 | ELVHFLLLKY |
| 895 | QVPGSDPACY |
| 896 | SVVGNWQYFF |
| 897 | TQHFVQENY |
| 898 | LVHFLLLKY |
| 899 | FVQENYLEY |
| 900 | WQYFFPVIF |
| 901 | EVDPIGHLY |
| 902 | VVGNWQYFF |

TABLE 91
MAGEA3 HLA-B*18 Epitope Peptides

| SEQ ID NO. | Sequence |
|---|---|
| 903 | EELSVLEVF |
| 904 | QEEEGPSTF |
| 905 | LESEFQAAL |
| 906 | PEEKIWEEL |
| 907 | AELVHFLLL |
| 908 | VETSYVKVL |
| 909 | EEEGPSTF |
| 910 | EEKIWEEL |
| 911 | AELVHFLL |
| 912 | LEARGEAL |

TABLE 92
MAGEA3 HLA-B*27:05 Epitope Peptides

| SEQ ID NO. | Sequence |
|---|---|
| 913 | AREPVTKAEM |
| 914 | SRKVAELVHF |
| 915 | SEFQAALSRK |
| 916 | RALVETSYVK |
| 917 | YRAREPVTK |
| 918 | PRALVETSY |
| 919 | SRKVAELVH |
| 920 | YFFPVIFSK |
| 921 | KAGLLIIVL |
| 922 | DSILGDPKK |

TABLE 93
MAGEA3 HLA-B*35:01 Epitope Peptides

| SEQ ID NO. | Sequence |
|---|---|
| 923 | APEEKIWEEL |
| 924 | GPRALVETSY |
| 925 | DPKKLLTQHF |
| 926 | EPVTKAEML |
| 927 | LPTTMNYPL |
| 928 | VPGSDPACY |
| 929 | YPPLHEWVL |
| 930 | GPHISYPPL |
| 931 | DPIGHLYIF |
| 932 | MPKAGLLII |

TABLE 94
MAGEA3 HLA-B*58:02 Epitope Peptides

| SEQ ID NO. | Sequence |
|---|---|
| 933 | KVAELVHFLL |
| 934 | KASSSLQLVF |
| 935 | SSSTLVEVTL |
| 936 | FSKASSSLQL |
| 937 | KAGLLIIVL |
| 938 | KVAELVHFL |
| 939 | SSTLVEVTL |
| 940 | SSLQLVFGI |
| 941 | KVLHHMVKI |
| 942 | SSLPTTMNY |

TABLE 95
MAGEA3 HLA-DRB1*0101 Epitope Peptides

| SEQ ID NO. | Sequence |
|---|---|
| 943 | PACYEFLWGPRALVE |
| 944 | YLEYRQVPGSDPACY |
| 945 | AGLLIIVLAIIAREG |
| 946 | GEALGLVGAQAPATE |
| 947 | QYFFPVIFSKASSSL |
| 948 | SSSLQLVFGIELMEV |
| 949 | EVTLGEVPAAESPDP |
| 950 | HHMVKISGGPHISYP |
| 951 | HFLLLKYRAREPVTK |
| 952 | ETSYVKVLHHMVKIS |

TABLE 96
MAGEA3 HLA-DRB1*0301 (DR17) Epitope Peptides

| SEQ ID NO. | Sequence |
|---|---|
| 953 | EDSILGDPKKLLTQH |
| 954 | IELMEVDPIGHLYIF |
| 955 | YDGLLGDNQIMPKAG |
| 956 | FPDLESEFQAALSRK |
| 957 | GPSTFPDLESEFQAA |
| 958 | LGSVVGNWQYFFPVI |
| 959 | ASSLPTTMNYPLWSQ |
| 960 | VAELVHFLLLKYRAR |
| 961 | CLGLSYDGLLGDNQI |
| 962 | SRKVAELVHFLLLKY |

TABLE 97
MAGEA3 HLA-DRB1*0401 (DR4Dw4) Epitope Peptides

| SEQ ID NO. | Sequence |
|---|---|
| 963 | PSTFPDLESEFQAAL |
| 964 | ESEFQAALSRKVAEL |
| 965 | QYFFPVIFSKASSSL |
| 966 | PVIFSKASSSLQLVF |
| 967 | ETSYVKVLHHMVKIS |
| 968 | FPDLESEFQAALSRK |
| 969 | SRKVAELVHFLLLKY |
| 970 | LMEVDPIGHLYIFAT |
| 971 | TSYVKVLHHMVKISG |
| 972 | WQYFFPVIFSKASSS |

TABLE 98
MAGEA3 HLA-DRB1*0701 Epitope Peptides

| SEQ ID NO. | Sequence |
|---|---|
| 973 | ESEFQAALSRKVAEL |
| 974 | ASSLPTTMNYPLWSQ |
| 975 | ATCLGLSYDGLLGDN |
| 976 | QYFFPVIFSKASSSL |
| 977 | FPVIFSKASSSLQLV |
| 978 | PVIFSKASSSLQLVF |
| 979 | GHLYIFATCLGLSYD |
| 980 | LEVFEGREDSILGDP |
| 981 | PRALVETSYVKVLHH |
| 982 | HISYPPLHEWVLREG |

TABLE 99
MAGEA3 HLA-DRB1*1101 Epitope Peptides

| SEQ ID NO. | Sequence |
|---|---|
| 983 | VKVLHHMVKISGGPH |
| 984 | WQYFFPVIFSKASSS |
| 985 | PACYEFLWGPRALVE |
| 986 | ETSYVKVLHHMVKIS |
| 987 | SRKVAELVHFLLLKY |
| 988 | ELVHFLLLKYRAREP |
| 989 | QYFFPVIFSKASSSL |
| 990 | YLEYRQVPGSDPACY |
| 991 | TSYVKVLHHMVKISG |
| 992 | SEFQAALSRKVAELV |

TABLE 100
MAGEA3 HLA-DRB1*1501 (DR2b) Epitope Peptides

| SEQ ID NO. | Sequence |
|---|---|
| 993 | GSVVGNWQYFFPVIF |
| 994 | HFLLLKYRAREPVTK |
| 995 | IGHLYIFATCLGLSY |
| 996 | VAELVHFLLLKYRAR |
| 997 | SSSLQLVFGIELMEV |
| 998 | GIELMEVDPIGHLYI |
| 999 | TCLGLSYDGLLGDNQ |
| 1000 | DNQIMPKAGLLIIVL |
| 1001 | AGLLIIVLAIIAREG |
| 1002 | LSVLEVFEGREDSIL |

[0252] MAGE A4 Antigenic Peptides

[0253] In some embodiments, the TVM composition includes MAGE-A4 (Melanoma-associated antigen 4) specific T-cells. MAGE-A4 specific T-cells can be generated as described below using one or more antigenic peptides to MAGE-A4. In some embodiments, the MAGE-A4 specific T-cells are generated using one or more antigenic peptides to MAGE-A4, or a modified or heteroclitic peptide derived from a MAGE-A4 peptide. In some embodiments, MAGE-A4 specific T-cells are generated using a MAGE-A4 antigen library comprising a pool of peptides (for example 15mers) containing amino acid overlap (for example 11 amino acids of overlap) between each sequence formed by scanning the protein amino acid sequence SEQ. ID. No. 1003 (UniProt KB—P43358) for MAGE-A4:

MSSEQKSQHCKPEEGVEAQEEALGLVGAQAPTTEEQEAAVSSSSPLVPGT
LEEVPAAESAGPPQSPQGASALPTTISFTCWRQPNEGSSSQEEEGPSTSP
DAESLFREALSNKVDELAHFLLRKYRAKELVTKAEMLERVIKNYKRCFPV
IFGKASESLKMIFGIDVKEVDPASNTYTLVTCLGLSYDGLLGNNQIFPKT
GLLIIVLGTIAMEGDSASEEEIWEELGVMGVYDGREHTVYGEPRKLLTQD
WVQENYLEYRQVPGSNPARYEFLWGPRALAETSYVKVLEHVVRVNARVRI
AYPSLREAALLEEEEGV

[0254] Overlapping antigenic libraries are commercially available, for example, from JPT, for example, from JPT (Product Code: PM-MAGEA4 (PepMix Human (MAGE-A4)). In some embodiments, the MAGE-A4 specific T-cells are generated using a commercially available overlapping antigenic library made up of MAGE-A4 peptides.

[0255] In some embodiments, the MAGE-A4 specific T-cells are generated using one or more antigenic peptides to MAGE-A4, or a modified or heteroclitic peptide derived from a MAGE-A4 peptide. In some embodiments, the MAGE-A4 specific T-cells are generated with peptides that recognize class I MHC molecules. In some embodiments, the MAGE-A4 specific T-cells are generated with peptides that recognize class II MHC molecules. In some embodiments, the MAGE-A4 specific T-cells are generated with peptides that recognize both class I and class II MHC molecules.

[0256] In some embodiments, the MAGE-A4 peptides used to prime and expand a T-cell subpopulation includes specifically selected HLA-restricted peptides generated by determining the HLA profile of the donor source, and including peptides derived from MAGE-A4 that best match the donor's HLA. In some embodiments, the MAGE-A4 peptides used to prime and expand a T-cell subpopulation are derived from HLA-restricted peptides selected from at least one or more of an HLA-A restricted peptide, HLA-B restricted peptide, or HLA-DR restricted peptide. Suitable methods for generating HLA-restricted peptides from an antigen have been described in, for example, Rammensee, HG., Bachmann, J., Emmerich, N. et al., SYFPEITHI: database for MHC ligands and peptide motifs. Immunogenetics (1999) 50: 213. https://doi.org/10.1007/s002510050595.

[0257] As provided herein, the HLA profile of a donor cell source can be determined, and T-cell subpopulations targeting MAGE-A4 derived, wherein the T-cell subpopulation is primed and expanded using a group of peptides that are HLA-restricted to the donor's HLA profile. In certain embodiments, the T-cell subpopulation is exposed to a peptide mix that includes one or more HLA-A restricted, HLA-B restricted, and HLA-DR restricted peptides. In certain embodiments, the T-cell subpopulation is exposed to a peptide mix that includes HLA-A restricted, HLA-B restricted, and HLA-DR restricted peptides, wherein the HLA-A matched peptides are selected from the peptides of Tables 101-107, the HLA-B peptides are selected from the peptides of Tables 108-114, and the HLA-DR peptides are selected from the peptides of Tables 115-120. For example, if the donor cell source has an HLA profile that is HLA-A*01/*02:01; HLA-B*15:01/*18; and HLA-DRB1*0101/*0301, then the MAGE-A4 peptides used to prime and expand the MAGE-A4 specific T-cell subpopulation are restricted to the specific HLA profile, and may include the peptides identified in Table 101 (Seq. ID. Nos. 1004-1013) for HLA-A*01; Table 102 (Seq. ID. Nos. 1014-1023) for HLA-A*02:01; Table 110 (Seq. ID. Nos. 1093-1102) for HLA-B*15:01; Table 111 (Seq. ID. Nos. 1103-1112) for HLA-B*18; Table 115 (Seq. ID. Nos. 1143-1152) for HLA-DRB1*0101; and Table 116 (Seq. ID. Nos. 1153-1162) for HLA-DRB1*0301. In some embodiments, the mastermix of peptides includes both an overlapping peptide library and specifically selected HLA-restricted peptides generated by determining the HLA profile of the donor source.

[0258] In some embodiments, the MAGE-A4 HLA-restricted epitopes are specific to at least both of the donor's HLA-A alleles, at least both of the donor's HLA-B alleles, and at least both of the donor's HLA-DR alleles. In some embodiments, the MAGE-A4 HLA-A alleles are selected from a group comprising HLA-A*01, HLA-A*02:01, HLA-A*03, HLA-A*11:01, HLA-A*24:02, HLA-A*26, or HLA-A*68:01, and the corresponding MAGE-A4 HLA-restricted peptides are selected for: HLA-A*01 from Table 101; HLA-A*02:01 from Table 102; HLA-A*03 from Table 103; HLA-A*11:01 from Table 104; HLA-A*24:02 from Table 105; HLA-A*26 from Table 106; or HLA-A*68:01 from Table 107; or any combination thereof. In some embodiments, the MAGE-A4 HLA-B alleles are selected from a group comprising HLA-B*07:02, HLA-B*08, HLA-B*15:01 (B62), HLA-B*18, HLA-B*27:05, HLA-B*35:01, or HLA-B*58:02, and the corresponding MAGE-A4 HLA-restricted peptides are selected for: HLA-B*07:02 from Table 108; HLA-B*08 from Table 109; HLA-B*15:01 (B62) from Table 110; HLA-B*18 from Table 111; HLA-B*27:05 from Table 112; HLA-B*35:01 from Table 113, or HLA-B*58:02 from Table 114; or any combination thereof. In some embodiments, the MAGE-A4 HLA-DR alleles are selected from a group comprising HLA-DRB1*0101, HLA-DRB1*0301 (DR17), HLA-DRB1*0401 (DR4Dw4), HLA-DRB1*0701, HLA-DRB1*1101, or HLA-DRB1*1501 (DR2b) and the corresponding MAGE-A4 HLA-restricted peptides are selected for: HLA-DRB1*0101 from Table 115; HLA-DRB1*0301 (DR17) from Table 116; HLA-DRB1*0401 (DR4Dw4) from Table 117; HLA-DRB1*0701 from Table 118; HLA-DRB1*1101 from Table 119; or HLA-DRB1*1501 (DR2b) from Table 120; or any combination thereof.

TABLE 101
MAGEA4 HLA-A*01 Epitope Peptides

| SEQ ID NO. | Sequence |
|---|---|
| 1004 | YTLVTCLGLSY |
| 1005 | VKEVDPASNTY |
| 1006 | IWEELGVMGVY |
| 1007 | QDWVQENYLEY |
| 1008 | VYDGREHTVY |
| 1009 | WEELGVMGVY |
| 1010 | LTQDWVQENY |
| 1011 | EVDPASNTY |
| 1012 | TQDWVQENY |
| 1013 | MLERVIKNY |

TABLE 102
MAGEA4 HLA-A*02:01 Epitope Peptides

| SEQ ID NO. | Sequence |
|---|---|
| 1014 | ALAETSYVKV |
| 1015 | GLLIIVLGTI |
| 1016 | MIFGIDVKEV |
| 1017 | PLVPGTLEEV |
| 1018 | VIFGKASESL |
| 1019 | ALSNKVDEL |
| 1020 | LLIIVLGTI |
| 1021 | ALLEEEEGV |
| 1022 | KVLEHVVRV |
| 1023 | QIFPKTGLL |

TABLE 103
MAGEA4 HLA-A*03 Epitope Peptides

| SEQ ID NO. | Sequence |
|---|---|
| 1024 | SLFREALSNK |
| 1025 | KYRAKELVTK |
| 1026 | RVRIAYPSLR |
| 1027 | TLVTCLGLSY |
| 1028 | QVPGSNPARY |
| 1029 | HVVRVNARVR |
| 1030 | ALAETSYVK |
| 1031 | FLLRKYRAK |
| 1032 | ALGLVGAQA |
| 1033 | ELAHFLLRK |

TABLE 104
MAGEA4 HLA-A*11:01 Epitope Peptides

| SEQ ID NO. | Sequence |
|---|---|
| 1034 | TSPDAESLFR |
| 1035 | YVKVLEHVVR |
| 1036 | SSEQKSQHCK |
| 1037 | LVTKAEMLER |
| 1038 | RVRIAYPSLR |
| 1039 | VTKAEMLER |
| 1040 | ELAHFLLRK |
| 1041 | GVMGVYDGR |
| 1042 | TTISFTCWR |
| 1043 | ALAETSYVK |

TABLE 105
MAGEA4 HLA-A*24:02 Epitope Peptides

| SEQ ID NO. | Sequence |
|---|---|
| 1044 | AYPSLREAAL |
| 1045 | TYTLVTCLGL |
| 1046 | NYKRCFPVIF |
| 1047 | IFPKTGLLII |
| 1048 | KVDELAHFLL |
| 1049 | VYGEPRKLL |
| 1050 | NYKRCFPVI |
| 1051 | EFLWGPRAL |
| 1052 | IFGKASESL |

TABLE 106
MAGEA4 HLA-A*26 Epitope Peptides

| SEQ ID NO. | Sequence |
|---|---|
| 1053 | EMLERVIKNY |
| 1054 | EGVEAQEEAL |
| 1055 | ELAHFLLRKY |
| 1056 | EALSNKVDEL |
| 1057 | DWVQENYLEY |
| 1058 | ETSYVKVLEH |
| 1059 | EVDPASNTY |
| 1060 | LVTCLGLSY |
| 1061 | ELVTKAEML |
| 1062 | WVQENYLEY |

TABLE 107
MAGEA4 HLA-A*68:01 Epitope Peptides

| SEQ ID NO. | Sequence |
|---|---|
| 1063 | ELAHFLLRKYR |
| 1064 | STSPDAESLFR |
| 1065 | ELVTKAEMLER |
| 1066 | YVKVLEHVVR |
| 1067 | PTTISFTCWR |
| 1068 | LVTKAEMLER |
| 1069 | ELAHFLLRK |
| 1070 | TTISFTCWR |
| 1071 | GVMGVYDGR |
| 1072 | QVPGSNPAR |

TABLE 108
MAGEA4 HLA-B*07:02 Epitope Peptides

| SEQ ID NO. | Sequence |
|---|---|
| 1073 | YPSLREAALL |
| 1074 | SPQGASALPT |
| 1075 | VPGTLEEVPA |
| 1076 | APTTEEQEAA |
| 1077 | DPASNTYTLV |
| 1078 | PPQSPQGASA |
| 1079 | YPSLREAAL |
| 1080 | DPASNTYTL |
| 1081 | APTTEEQEA |
| 1082 | FPKTGLLII |

TABLE 109
MAGEA4 HLA-B*08 Epitope Peptides

| SEQ ID NO. | Sequence |
|---|---|
| 1083 | LRKYRAKEL |
| 1084 | ALSNKVDEL |
| 1085 | ELVTKAEML |
| 1086 | YPSLREAAL |
| 1087 | QIFPKTGLL |
| 1088 | VIKNYKRCF |
| 1089 | SLREAALL |
| 1090 | SLKMIFGI |
| 1091 | QIFPKTGL |
| 1092 | FPKTGLLI |

TABLE 110
MAGEA4 HLA-B*15:01 (B62) Epitope Peptides

| SEQ ID NO. | Sequence |
|---|---|
| 1093 | TLVTCLGLSY |
| 1094 | RVNARVRIAY |
| 1095 | ELAHFLLRKY |
| 1096 | QVPGSNPARY |
| 1097 | RVIKNYKRCF |
| 1098 | MLERVIKNY |
| 1099 | TQDWVQENY |
| 1100 | LVTCLGLSY |
| 1101 | WVQENYLEY |
| 1102 | EVDPASNTY |

TABLE 111
MAGEA4 HLA-B*18 Epitope Peptides

| SEQ ID NO. | Sequence |
|---|---|
| 1103 | AESLFREAL |
| 1104 | SEEEIWEEL |
| 1105 | EELGVMGVY |
| 1106 | AETSYVKVL |
| 1107 | DELAHFLL |
| 1108 | EEEIWEEL |
| 1109 | LERVIKNY |
| 1110 | SESLKMIF |
| 1111 | VEAQEEAL |
| 1112 | DGREHTVY |

TABLE 112
MAGEA4 HLA-B*27:05 Epitope Peptides

| SEQ ID NO. | Sequence |
|---|---|
| 1113 | KRCFPVIFGK |
| 1114 | ARYEFLWGPR |
| 1115 | ARVRIAYPSL |
| 1116 | YRAKELVTK |
| 1117 | ERVIKNYKR |
| 1118 | VRIAYPSLR |
| 1119 | LRKYRAKEL |
| 1120 | RCFPVIFGK |
| 1121 | PRALAETSY |
| 1122 | KMIFGIDVK |

TABLE 113
MAGEA4 HLA-B*35:01 Epitope Peptides

| SEQ ID NO. | Sequence |
|---|---|
| 1123 | YPSLREAALL |
| 1124 | GPRALAETSY |
| 1125 | DPASNTYTL |
| 1126 | YPSLREAAL |
| 1127 | VPGSNPARY |
| 1128 | FPKTGLLII |
| 1129 | LPTTISFTC |
| 1130 | KVDELABFL |
| 1131 | MLERVIKNY |
| 1132 | LGLSYDGLL |

TABLE 114
MAGEA4 HLA-B*58:02 Epitope Peptides

| SEQ ID NO. | Sequence |
|---|---|
| 1133 | RVIKNYKRCF |
| 1134 | KASESLKMIF |
| 1135 | SSSPLVPGTL |
| 1136 | KAEMLERVI |
| 1137 | KTGLLIIVL |
| 1138 | KVDELAHFL |
| 1139 | KASESLKMI |
| 1140 | PSLREAALL |
| 1141 | SSPLVPGTL |
| 1142 | LAHFLLRKY |

TABLE 115
MAGEA4 HLA-DRB1*0101 Epitope Peptides

| SEQ ID NO. | Sequence |
|---|---|
| 1143 | PARYEFLWGPRALAE |
| 1144 | TGLLIIVLGTIAMEG |
| 1145 | YLEYRQVPGSNPARY |
| 1146 | KRCFPVIFGKASESL |
| 1147 | EEALGLVGAQAPTTE |
| 1148 | SESLKMIFGIDVKEV |
| 1149 | GLLIIVLGTIAMEGD |
| 1150 | PGTLEEVPAAESAGP |
| 1151 | HFLLRKYRAKELVTK |
| 1152 | EEIWEELGVMGVYDG |

TABLE 116
MAGEA4 HLA-DRB1*0301 (DR17) Epitope Peptides

| SEQ ID NO. | Sequence |
|---|---|
| 1153 | GPSTSPDAESLFREA |
| 1154 | EHTVYGEPRKLLTQD |
| 1155 | LERVIKNYKRCFPVI |
| 1156 | VVRVNARVRIAYPSL |
| 1157 | KMIFGIDVKEVDPAS |
| 1158 | KAEMLERVIKNYKRC |
| 1159 | CLGLSYDGLLGNNQI |
| 1160 | RKLLTQDWVQENYLE |
| 1161 | ALSNKVDELAHFLLR |
| 1162 | TYTLVTCLGLSYDGL |

TABLE 117
MAGEA4 HLA-DRB1*0401 (DR4Dw4) Epitope Peptides

| SEQ ID NO. | Sequence |
|---|---|
| 1163 | ESLFREALSNKVDEL |
| 1164 | SNKVDELAHFLLRKY |
| 1165 | VKEVDPASNTYTLVT |
| 1166 | GLLIIVLGTIAMEGD |
| 1167 | EHTVYGEPRKLLTQD |
| 1168 | VKVLEHVVRVNARVR |
| 1169 | KRCFPVIFGKASESL |
| 1170 | PVIFGKASESLKMIF |
| 1171 | SNTYTLVTCLGLSYD |
| 1172 | GLSYDGLLGNNQIFP |

TABLE 118
MAGEA4 HLA-DRB1*0701 Epitope Peptides

| SEQ ID NO. | Sequence |
|---|---|
| 1173 | ESLFREALSNKVDEL |
| 1174 | VTCLGLSYDGLLGNN |
| 1175 | NQIFPKTGLLIIVLG |
| 1176 | ASALPTTISFTCWRQ |
| 1177 | FPVIFGKASESLKMI |
| 1178 | GLLIIVLGTIAMEGD |
| 1179 | PRALAETSYVKVLEH |
| 1180 | ETSYVKVLEHVVRVN |
| 1181 | RIAYPSLREAALLEE |
| 1182 | EQEAAVSSSSPLVPG |

TABLE 119
MAGEA4 HLA-DRB1*1101 Epitope Peptides

| SEQ ID NO. | Sequence |
|---|---|
| 1183 | VKVLEHVVRVNARVR |
| 1184 | RYEFLWGPRALAETS |
| 1185 | PARYEFLWGPRALAE |
| 1186 | ELAHFLLRKYRAKEL |
| 1187 | KRCFPVIFGKASESL |
| 1188 | YLEYRQVPGSNPARY |
| 1189 | TSYVKVLEHVVRVNA |
| 1190 | SNKVDELAHFLLRKY |
| 1191 | KMIFGIDVKEVDPAS |
| 1192 | AEMLERVIKNYKRCF |

TABLE 120
MAGEA4 HLA-DRB1*1501 (DR2b) Epitope Peptides

| SEQ ID NO. | Sequence |
|---|---|
| 1193 | HFLLRKYRAKELVTK |
| 1194 | LGVMGVYDGREHTVY |
| 1195 | EAAVSSSSPLVPGTL |
| 1196 | ASALPTTISFTCWRQ |
| 1197 | ERVIKNYKRCFPVIF |
| 1198 | SESLKMIFGIDVKEV |
| 1199 | TCLGLSYDGLLGNNQ |
| 1200 | NNQIFPKTGLLIIVL |
| 1201 | GLLIIVLGTIAMEGD |
| 1202 | LIIVLGTIAMEGDSA |

[0259] SSX2 Antigenic Peptides

[0260] In some embodiments, the TVM composition includes SSX2 (Synovial sarcoma, X breakpoint 2) specific T-cells. SSX2 specific T-cells can be generated as described below using one or more antigenic peptides to SSX2. In some embodiments, the SSX2 specific T-cells are generated using one or more antigenic peptides to SSX2, or a modified or heteroclitic peptide derived from a SSX2 peptide. In some embodiments, SSX2 specific T-cells are generated using a SSX2 antigen library comprising a pool of peptides (for example 15mers) containing amino acid overlap (for example 11 amino acids of overlap) between each sequence formed by scanning the protein amino acid sequence SEQ. ID. No. 1203 (UniProt KB—Q16385) for SSX2:

MNGDDAFARRPTVGAQIPEKIQKAFDDIAKYFSKEEWEKMKASEKIFYV
YMKRKYEAMTKLGFKATLPPFMCNKRAEDFQGNDLDNDPNRGNQVERPQ
MTFGRLQGISPKIMPKKPAEEGNDSEEVPEASGPQNDGKELCPPGKPTT
SEKIHERSGPKRGEHAWTHRLRERKQLVIYEEISDPEEDDE.

[0261] Overlapping antigenic libraries are commercially available, for example, from JPT, for example, from JPT (Product Code: PM-SSX2 (PepMix Human (SSX2)). In some embodiments, the SSX2 specific T-cells are generated using a commercially available overlapping antigenic library made up of SSX2 peptides.

[0262] In some embodiments, the SSX2 specific T-cells are generated using one or more antigenic peptides to SSX2, or a modified or heteroclitic peptide derived from a SSX2 peptide. In some embodiments, the SSX2 specific T-cells are generated with peptides that recognize class I MHC molecules. In some embodiments, the SSX2 specific T-cells are generated with peptides that recognize class II MHC molecules. In some embodiments, the SSX2 specific T-cells are generated with peptides that recognize both class I and class II MHC molecules.

[0263] In some embodiments, the SSX2 peptides used to prime and expand a T-cell subpopulation includes specifically selected HLA-restricted peptides generated by determining the HLA profile of the donor source, and including peptides derived from SSX2 that best match the donor's HLA. In some embodiments, the SSX2 peptides used to prime and expand a T-cell subpopulation are derived from HLA-restricted peptides selected from at least one or more of an HLA-A restricted peptide, HLA-B restricted peptide, or HLA-DR restricted peptide. Suitable methods for generating HLA-restricted peptides from an antigen have been described in, for example, Rammensee, HG., Bachmann, J., Emmerich, N. et al., SYFPEITHI: database for MHC ligands and peptide motifs. Immunogenetics (1999) 50: 213. https://doi.org/10.1007/s002510050595.

[0264] As provided herein, the HLA profile of a donor cell source can be determined, and T-cell subpopulations targeting SSX2 derived, wherein the T-cell subpopulation is primed and expanded using a group of peptides that are HLA-restricted to the donor's HLA profile. In certain embodiments, the T-cell subpopulation is exposed to a peptide mix that includes one or more HLA-A restricted, HLA-B restricted, and HLA-DR restricted peptides. In certain embodiments, the T-cell subpopulation is exposed to a peptide mix that includes HLA-A restricted, HLA-B restricted, and HLA-DR restricted peptides, wherein the HLA-A matched peptides are selected from the peptides of Tables 121-127, the HLA-B peptides are selected from the peptides of Tables 128-134, and the HLA-DR peptides are selected from the peptides of Tables 135-140. For example, if the donor cell source has an HLA profile that is HLA-A*01/*02:01; HLA-B*15:01/*18; and HLA-DRB1*0101/*0301, then the SSX2 peptides used to prime and expand the SSX2 specific T-cell subpopulation are restricted to the specific HLA profile, and may include the peptides identified in Table 121 (Seq. ID. Nos. 1204-1213) for HLA-A*01; Table 122 (Seq. ID. Nos. 1214-1223) for HLA-A*02:01; Table 130 (Seq. ID. Nos. 1294-1303) for HLA-B*15:01; Table 131 (Seq. ID. Nos. 1304-1313) for HLA-B*18; Table 135 (Seq. ID. Nos. 1344-1353) for HLA-DRB1*0101; and Table 136 (Seq. ID. Nos. 1354-1363) for HLA-DRB1*0301. In some embodiments, the mastermix of peptides includes both an overlapping peptide library and specifically selected HLA-restricted peptides generated by determining the HLA profile of the donor source.

[0265] In some embodiments, the SSX2 HLA-restricted epitopes are specific to at least both of the donor's HLA-A alleles, at least both of the donor's HLA-B alleles, and at least both of the donor's HLA-DR alleles. In some embodiments, the SSX2 HLA-A alleles are selected from a group comprising HLA-A*01, HLA-A*02:01, HLA-A*03, HLA-A*11:01, HLA-A*24:02, HLA-A*26, or HLA-A*68:01, and the corresponding SSX2 HLA-restricted peptides are selected for: HLA-A*01 from Table 121; HLA-A*02:01 from Table 122; HLA-A*03 from Table 123; HLA-A*11:01 from Table 124; HLA-A*24:02 from Table 125; HLA-A*26 from Table 126; or HLA-A*68:01 from Table 127; or any combination thereof. In some embodiments, the SSX2 HLA-B alleles are selected from a group comprising HLA-B*07:02, HLA-B*08, HLA-B*15:01 (B62), HLA-B*18, HLA-B*27:05, HLA-B*35:01, or HLA-B*58:02, and the corresponding SSX2 HLA-restricted peptides are selected for: HLA-B*07:02 from Table 128; HLA-B*08 from Table 129; HLA-B*15:01 (B62) from Table 130; HLA-B*18 from Table 131; HLA-B*27:05 from Table 132; HLA-B*35:01 from Table 133, or HLA-B*58:02 from Table 134; or any combination thereof. In some embodiments, the SSX2 HLA-DR alleles are selected from a group comprising HLA-DRB1*0101, HLA-DRB1*0301 (DR17), HLA-DRB1*0401 (DR4Dw4), HLA-DRB1*0701, HLA-DRB1*1101, or HLA-DRB1*1501 (DR2b) and the corresponding SSX2 HLA-restricted peptides are selected for: HLA-DRB1*0101 from Table 135; HLA-DRB1*0301 (DR17) from Table 136; HLA-DRB1*0401 (DR4Dw4) from Table 137; HLA-DRB1*0701 from Table 138; HLA-DRB1*1101 from Table 139; or HLA-DRB1*1501 (DR2b) from Table 140; or any combination thereof.

TABLE 121
SSX2 HLA-A*01 Epitope Peptides

| SEQ ID NO. | Sequence |
|---|---|
| 1204 | RLRERKQLVIY |
| 1205 | EKMKASEKIFY |
| 1206 | KIFYVYMKRKY |
| 1207 | IQKAFDDIAKY |
| 1208 | MKASEKIFYVY |
| 1209 | LRERKQLVIY |
| 1210 | IFYVYMKRKY |
| 1211 | ASEKIFYVY |
| 1212 | KAFDDIAKY |
| 1213 | FYVYMKRKY |

TABLE 122
SSX2 HLA-A*02:01 Epitope Peptides

| SEQ ID NO. | Sequence |
|---|---|
| 1214 | RLRERKQLVI |
| 1215 | QMTFGRLQGI |
| 1216 | RLQGISPKI |
| 1217 | KASEKIFYV |
| 1218 | RLRERKQLV |
| 1219 | QIPEKIQKA |
| 1220 | MTFGRLQGI |
| 1221 | TKLGFKATL |
| 1222 | DAFARRPTV |
| 1223 | KIQKAFDDI |

TABLE 123
SSX2 HLA-A*03 Epitope Peptides

| SEQ ID NO. | Sequence |
|---|---|
| 1224 | RLRERKQLVI |
| 1225 | KIFYVYMKRK |
| 1226 | KIHERSGPK |
| 1227 | QVERPQMTF |
| 1228 | TLPPFMCNK |
| 1229 | GISPKIMPK |
| 1230 | TVGAQIPEK |
| 1231 | AQIPEKIQK |
| 1232 | KRKYEAMTK |
| 1233 | ARRPTVGAQI |

TABLE 124
SSX2 HLA-A*11:01 Epitope Peptides

| SEQ ID NO. | Sequence |
|---|---|
| 1234 | ATLPPFMCNK |
| 1235 | PTVGAQIPEK |
| 1236 | PTTSEKIHER |
| 1237 | FSKEEWEKMK |
| 1238 | ASGPQNDGK |
| 1239 | TVGAQIPEK |
| 1240 | GISPKIMPK |
| 1241 | TTSEKIHER |
| 1242 | WTHRLRERK |
| 1243 | AQIPEKIQK |

TABLE 125
SSX2 HLA-A*24:02 Epitope Peptides

| SEQ ID NO. | Sequence |
|---|---|
| 1244 | KYEAMTKLGF |
| 1245 | TVGAQIPEKI |
| 1246 | QIPEKIQKAF |
| 1247 | VYMKRKYEAM |
| 1248 | GRLQGISPKI |
| 1249 | AFDDIAKYF |
| 1250 | VGAQIPEKI |
| 1251 | GFKATLPPF |
| 1252 | GKPTTSEKI |
| 1253 | KQLVIYEEI |

TABLE 126
SSX2 HLA-A*26 Epitope Peptides

| SEQ ID NO. | Sequence |
|---|---|
| 1254 | EVPEASGPQN |
| 1255 | ERPQMTFGRL |
| 1256 | LVIYEEISDP |
| 1257 | EKMKASEKIF |
| 1258 | MTKLGFKATL |
| 1259 | KAFDDIAKY |
| 1260 | EKIFYVYMK |
| 1261 | QVERPQMTF |
| 1262 | EAMTKLGFK |
| 1263 | MTFGRLQGI |

TABLE 127
SSX2 HLA-A*68:01 Epitope Peptides

| SEQ ID NO. | Sequence |
|---|---|
| 1264 | ATLPPFMCNKR |
| 1265 | KIQKAFDDIAK |
| 1266 | QVERPQMTFGR |
| 1267 | GAQIPEKIQK |
| 1268 | DPNRGNQVER |
| 1269 | EASGPQNDGK |
| 1270 | TTSEKIHER |
| 1271 | EAMTKLGFK |
| 1272 | TVGAQIPEK |
| 1273 | GISPKIMPK |

TABLE 128
SSX2 HLA-B*07:02 Epitope Peptides

| SEQ ID NO. | Sequence |
|---|---|
| 1274 | SPKIMPKKPA |
| 1275 | GPKRGEHAWT |
| 1276 | LPPFMCNKRA |
| 1277 | RPQMTFGRL |
| 1278 | GPQNDGKEL |
| 1279 | IPEKIQKAF |
| 1280 | PPGKPTTSE |
| 1281 | FARRPTVGA |
| 1282 | AEDFQGNDL |
| 1283 | MPKKPAEEG |

TABLE 129
SSX2 HLA-B*08 Epitope Peptides

| SEQ ID NO. | Sequence |
|---|---|
| 1284 | WEKNIKASEK |
| 1285 | YMKRKYEAM |
| 1286 | SPKIMPKKP |
| 1287 | GPQNDGKEL |
| 1288 | RLRERKQL |
| 1289 | KLGFKATL |
| 1290 | EAMTKLGF |
| 1291 | IQKAFDDI |
| 1292 | GPKRGEHA |
| 1293 | GFKATLPPF |

TABLE 130
SSX2 HLA-B*15:01 (B62) Epitope Peptides

| SEQ ID NO. | Sequence |
|---|---|
| 1294 | NQVERPQMTF |
| 1295 | AQIPEKIQKA |
| 1296 | KASEKIFYVY |
| 1297 | RLRERKQLVI |
| 1298 | RLQGISPKIM |
| 1299 | ELCPPGKPTT |
| 1300 | KAFDDIAKY |
| 1301 | AQIPEKIQK |
| 1302 | PQNDGKELC |
| 1303 | RLRERKQLV |

TABLE 131
SSX2 HLA-B*18 Epitope Peptides

| SEQ ID NO. | Sequence |
|---|---|
| 1304 | RERKQLVIY |
| 1305 | YEAMTKLGF |
| 1306 | AEDFQGNDL |
| 1307 | GEHAWTHRL |
| 1308 | EEISDPEED |
| 1309 | SEKIFYVY |
| 1310 | PEKIQKAF |
| 1311 | VERPQMTF |
| 1312 | EEWEKMKA |
| 1313 | EEVPEASG |

TABLE 132
SSX2 HLA-B*27:05 Epitope Peptides

| SEQ ID NO. | Sequence |
|---|---|
| 1314 | GRLQGISPKI |
| 1315 | KRKYEAMTKL |
| 1316 | KRGEHAWTHR |
| 1317 | ERPQMTFGRL |
| 1318 | ERSGPKRGEH |
| 1319 | GRLQGISPK |
| 1320 | KRKYEAMTK |
| 1321 | HRLRERKQL |
| 1322 | RRPTVGAQI |
| 1323 | LRERKQLVI |

TABLE 133
SSX2 HLA-B*35:01 Epitope Peptides

| SEQ ID NO. | Sequence |
|---|---|
| 1324 | THRLRERKQL |
| 1325 | KRKYEAMTKL |
| 1326 | ERPQMTFGRL |
| 1327 | GRLQGISPKI |
| 1328 | IHERSGPKRG |
| 1329 | LRERKQLVI |
| 1330 | RRPTVGAQI |
| 1331 | AFDDIAKYF |
| 1332 | TKLGFKATL |
| 1333 | AEDFQGNDL |

TABLE 134
SSX2 HLA-B*58:02 Epitope Peptides

| SEQ ID NO. | Sequence |
|---|---|
| 1334 | KAFDDIAKYF |
| 1335 | KASEKIFYVY |
| 1336 | RAEDFQGNDL |
| 1337 | MTKLGFKATL |
| 1338 | ASEKIFYVYM |
| 1339 | IAKYFSKEEW |
| 1340 | KAFDDIAKY |
| 1341 | FSKEEWEKM |
| 1342 | ASEKIFYVY |
| 1343 | QVERPQMTF |

TABLE 135
SSX2 HLA-DRB1*0101 Epitope Peptides

| SEQ ID NO. | Sequence |
|---|---|
| 1344 | QMTFGRLQGISPKIM |
| 1345 | RPTVGAQIPEKIQKA |
| 1346 | FGRLQGISPKIMPKK |
| 1347 | DDAFARRPTVGAQIP |
| 1348 | KEEWEKMKASEKIFY |
| 1349 | KRKYEAMTKLGFKAT |
| 1350 | KLGFKATLPPFMCNK |
| 1351 | QKAFDDIAKYFSKEE |
| 1352 | PPFMCNKRAEDFQGN |
| 1353 | QGISPKIMPKKPAEE |

TABLE 136
SSX2 HLA-DRB1*0301 (DR17) Epitope Peptides

| SEQ ID NO. | Sequence |
|---|---|
| 1354 | GNDLDNDPNRGNQVE |
| 1355 | GAQIPEKIQKAFDDI |
| 1356 | WEKMKASEKIFYVYM |
| 1357 | EKIFYVYMKRKYEAM |
| 1358 | KIQKAFDDIAKYFSK |
| 1359 | THRLRERKQLVIYEE |
| 1360 | IQKAFDDIAKYFSKE |
| 1361 | YVYMKRKYEAMTKLG |
| 1362 | PPFMCNKRAEDFQGN |
| 1363 | CNKRAEDFQGNDLDN |

TABLE 137
SSX2 HLA-DRB1*0401 (DR4Dw4) Epitope Peptides

| SEQ ID NO. | Sequence |
|---|---|
| 1364 | GNDLDNDPNRGNQVE |
| 1365 | QKAFDDIAKYFSKEE |
| 1366 | AKYFSKEEWEKMKAS |
| 1367 | PEKIQKAFDDIAKYF |
| 1368 | SEKIFYVYMKRKYEA |
| 1369 | YEAMTKLGFKATLPP |
| 1370 | FGRLQGISPKIMPKK |
| 1371 | SEEVPEASGPQNDGK |
| 1372 | QLVIYEEISDPEEDD |
| 1373 | MNGDDAFARRPTVGA |

TABLE 138
SSX2 HLA-DRB1*0701 Epitope Peptides

| SEQ ID NO. | Sequence |
|---|---|
| 1374 | KLGFKATLPPFMCNK |
| 1375 | PEKIQKAFDDIAKYF |
| 1376 | CPPGKPTTSEKIHER |
| 1377 | DDAFARRPTVGAQIP |
| 1378 | FGRLQGISPKIMPKK |
| 1379 | PKRGEHAWTHRLRER |
| 1380 | LVIYEEISDPEEDDE |
| 1381 | WEKMKASEKIFYVYM |
| 1382 | AKYFSKEEWEKMKAS |
| 1383 | EWEKMKASEKIFYVY |

TABLE 139
SSX2 HLA-DRB1*1101 Epitope Peptides

| SEQ ID NO. | Sequence |
|---|---|
| 1384 | QKAFDDIAKYFSKEE |
| 1385 | KIFYVYMKRKYEAMT |
| 1386 | KRKYEAMTKLGFKAT |
| 1387 | QMTFGRLQGISPKIM |
| 1388 | EHAWTHRLRERKQLV |
| 1389 | EKIFYVYMKRKYEAM |
| 1390 | IFYVYMKRKYEAMTK |
| 1391 | GISPKIMPKKPAEEG |
| 1392 | LPPFMCNKRAEDFQG |
| 1393 | DDAFARRPTVGAQIP |

TABLE 140
SSX2 HLA-DRB1*1501 (DR2b) Epitope Peptides

| SEQ ID NO. | Sequence |
|---|---|
| 1394 | RKQLVIYEEISDPEE |
| 1395 | FDDIAKYFSKEEWEK |
| 1396 | VYMKRKYEAMTKLGF |
| 1397 | MTKLGFKATLPPFMC |
| 1398 | KATLPPFMCNKRAED |
| 1399 | DDAFARRPTVGAQIP |
| 1400 | QMTFGRLQGISPKIM |
| 1401 | EKIQKAFDDIAKYFS |
| 1402 | YFSKEEWEKMKASEK |
| 1403 | ASEKIFYVYMKRKYE |

[0266] PR3 Antigenic Peptides

[0267] In some embodiments, the TVM composition includes PR3 (leukocyte proteinase 3) specific T-cells. PR3 specific T-cells can be generated as described below using one or more antigenic peptides to PR3. In some embodiments, the PR3 specific T-cells are generated using one or more antigenic peptides to PR3, or a modified or heteroclitic peptide derived from a PR3 peptide. In some embodiments, PR3 specific T-cells are generated using a PR3 antigen library comprising a pool of peptides (for example 15mers) containing amino acid overlap (for example 11 amino acids of overlap) between each sequence formed by scanning the protein amino acid sequence SEQ. ID. No. 1404 (UniProt KB—P24158) for PR3:

MAHRPPSPALASVLLALLLSGAARAAEIVGGHEAQPHSRPYMASLQMRG
NPGSHFCGGTLIHPSFVLTAAHCLRDIPQRLVNVVLGAHNVRTQEPTQQ
HFSVAQVFLNNYDAENKLNDVLLIQLSSPANLSASVATVQLPQQDQPVP
HGTQCLAMGWGRVGAHDPPAQVLQELNVTVVTFFCRPHNICTFVPRRKA
GICFGDSGGPLICDGIIQGIDSFVIWGCATRLFPDFFTRVALYVDWIRS
TLRRVEAKGRP.

[0268] In some embodiments, the PR3 specific T-cells are generated using one or more antigenic peptides to PR3, or a modified or heteroclitic peptide derived from a PR3 peptide. In some embodiments, the PR3 specific T-cells are generated with peptides that recognize class I MHC molecules. In some embodiments, the PR3 specific T-cells are generated with peptides that recognize class II MHC molecules. In some embodiments, the PR3 specific T-cells are generated with peptides that recognize both class I and class II MHC molecules.

[0269] In some embodiments, the PR3 peptides used to prime and expand a T-cell subpopulation includes specifically selected HLA-restricted peptides generated by determining the HLA profile of the donor source, and including peptides derived from PR3 that best match the donor's HLA. In some embodiments, the PR3 peptides used to prime and expand a T-cell subpopulation are derived from HLA-restricted peptides selected from at least one or more of an HLA-A restricted peptide, HLA-B restricted peptide, or HLA-DR restricted peptide. Suitable methods for generating HLA-restricted peptides from an antigen have been described in, for example, Rammensee, HG., Bachmann, J., Emmerich, N. et al., SYFPEITHI: database for MHC ligands and peptide motifs. Immunogenetics (1999) 50: 213. https://doi.org/10.1007/s002510050595.

[0270] As provided herein, the HLA profile of a donor cell source can be determined, and T-cell subpopulations targeting PR3 derived, wherein the T-cell subpopulation is primed and expanded using a group of peptides that are HLA-restricted to the donor's HLA profile. In certain embodiments, the T-cell subpopulation is exposed to a peptide mix that includes one or more HLA-A restricted, HLA-B restricted, and HLA-DR restricted peptides. In certain embodiments, the T-cell subpopulation is exposed to a peptide mix that includes HLA-A restricted, HLA-B restricted, and HLA-DR restricted peptides, wherein the HLA-A matched peptides are selected from the peptides of Tables 141-147, the HLA-B peptides are selected from the peptides of Tables 148-154, and the HLA-DR peptides are selected from the peptides of Tables 155-160. For example, if the donor cell source has an HLA profile that is HLA-A*01/*02:01; HLA-B*15:01/*18; and HLA-DRB1*0101/*0301, then the PR3 peptides used to prime and expand the PR3 specific T-cell subpopulation are restricted to the specific HLA profile, and may include the peptides identified in Table 141 (Seq. ID. Nos. 1405-1414) for HLA-A*01; Table 142 (Seq. ID. Nos. 1415-1424) for HLA-A*02:01; Table 150 (Seq. ID. Nos. 1495-1504) for HLA-B*15:01; Table 151 (Seq. ID. Nos. 1505-1514) for HLA-B*18; Table 155 (Seq. ID. Nos. 1545-1554) for HLA-DRB1*0101; and Table 156 (Seq. ID. Nos. 1555-1564) for HLA-DRB1*0301. In some embodiments, the mastermix of peptides includes both an overlapping peptide library and specifically selected HLA-restricted peptides generated by determining the HLA profile of the donor source.

[0271] In some embodiments, the PR3 HLA-restricted epitopes are specific to at least both of the donor's HLA-A alleles, at least both of the donor's HLA-B alleles, and at least both of the donor's HLA-DR alleles. In some embodiments, the PR3 HLA-A alleles are selected from a group comprising HLA-A*01, HLA-A*02:01, HLA-A*03, HLA-A*11:01, HLA-A*24:02, HLA-A*26, or HLA-A*68:01, and the corresponding PR3 HLA-restricted peptides are selected for: HLA-A*01 from Table 141; HLA-A*02:01 from Table 142; HLA-A*03 from Table 143; HLA-A*11:01 from Table 144; HLA-A*24:02 from Table 145; HLA-A*26 from Table 146; or HLA-A*68:01 from Table 147; or any combination thereof. In some embodiments, the PR3 HLA-B alleles are selected from a group comprising HLA-B*07:02, HLA-B*08, HLA-B*15:01 (B62), HLA-B*18, HLA-B*27:05, HLA-B*35:01, or HLA-B*58:02, and the corresponding PR3 HLA-restricted peptides are selected for: HLA-B*07:02 from Table 148; HLA-B*08 from Table 149; HLA-B*15:01 (B62) from Table 150; HLA-B*18 from Table 151; HLA-B*27:05 from Table 152; HLA-B*35:01 from Table 153, or HLA-B*58:02 from Table 154; or any combination thereof. In some embodiments, the PR3 HLA-DR alleles are selected from a group comprising HLA-DRB1*0101, HLA-DRB1*0301 (DR17), HLA-DRB1*0401 (DR4Dw4), HLA-DRB1*0701, HLA-DRB1*1101, or HLA-DRB1*1501 (DR2b) and the corresponding PR3 HLA-restricted peptides are selected for: HLA-DRB1*0101 from Table 155; HLA-DRB1*0301 (DR17) from Table 156; HLA-DRB1*0401 (DR4Dw4) from Table 157; HLA-DRB1*0701 from Table 158; HLA-DRB1*1101 from Table 159; or HLA-DRB1*1501 (DR2b) from Table 160; or any combination thereof.

TABLE 141
Pr3 HLA-A*01 Epitope Peptides

| SEQ ID NO. | Sequence |
|---|---|
| 1405 | FPDFFTRVALY |
| 1406 | GHEAQPHSRPY |
| 1407 | FSVAQVFLNNY |
| 1408 | SVAQVFLNNY |
| 1409 | HEAQPHSRPY |
| 1410 | LRDIPQRLVN |
| 1411 | DFFTRVALY |
| 1412 | EAQPHSRPY |
| 1413 | VAQVFLNNY |
| 1414 | YVDWIRSTLRR |

TABLE 142
Pr3 HLA-A*02:01 Epitope Peptides

| SEQ ID NO. | Sequence |
|---|---|
| 1415 | ALASVLLALL |
| 1416 | KLNDVLLIQL |
| 1417 | VLQELNVTVV |
| 1418 | LICDGIIQGI |
| 1419 | LIHPSFVLTA |
| 1420 | RLFPDFFTRV |
| 1421 | ALYVDWIRST |
| 1422 | NLSASVATV |
| 1423 | LLALLLSGA |
| 1424 | CLAMGWGRV |

TABLE 143
Pr3 HLA-A*03 Epitope Peptides

| SEQ ID NO. | Sequence |
|---|---|
| 1425 | FLNNYDAENK |
| 1426 | TLRRVEAKGR |
| 1427 | QVLQELNVTV |
| 1428 | IVGGHEAQPH |
| 1429 | RLVNVVLGAH |
| 1430 | ALLLSGAAR |
| 1431 | FVIWGCATR |
| 1432 | RLFPDFFTR |
| 1433 | VVLGAHNVR |
| 1434 | ELNVTVVTF |

TABLE 144
Pr3 HLA-A*11:01 Epitope Peptides

| SEQ ID NO. | Sequence |
|---|---|
| 1435 | FVLTAAHCLR |
| 1436 | NVTVVTFFCR |
| 1437 | YVDWIRSTLR |
| 1438 | RVALYVDWIR |
| 1439 | STLRRVEAK |
| 1440 | VVLGAHNVR |
| 1441 | ASVLLALLL |
| 1442 | SVLLALLLS |
| 1443 | VTVVTFFCR |
| 1444 | SVAQVFLNN |

TABLE 145
Pr3 HLA-A*24:02 Epitope Peptides

| SEQ ID NO. | Sequence |
|---|---|
| 1445 | LYVDWIRSTL |
| 1446 | CFGDSGGPLI |
| 1447 | TFVPRRKAGI |
| 1448 | SFVLTAAHCL |
| 1449 | PSPALASVLL |
| 1450 | VIWGCATRLF |
| 1451 | TFFCRPHNI |
| 1452 | CFGDSGGPL |
| 1453 | HFSVAQVFL |
| 1454 | NKLNDVLLI |

TABLE 146
Pr3 HLA-A*26 Epitope Peptides

| SEQ ID NO. | Sequence |
|---|---|
| 1455 | SVAQVFLNNY |
| 1456 | DGIIQGIDSF |
| 1457 | DVLLIQLSSP |
| 1458 | ELNVTVVTFF |
| 1459 | FVIWGCATRL |
| 1460 | DFFTRVALY |
| 1461 | ELNVTVVTF |
| 1462 | DVLLIQLSS |
| 1463 | YVDWIRSTL |
| 1464 | EAQPHSRPY |

TABLE 147
Pr3 HLA-A*68:01 Epitope Peptides

| SEQ ID NO. | Sequence |
|---|---|
| 1465 | DSFVIWGCATR |
| 1466 | LLALLLSGAAR |
| 1467 | GTQCLAMGWGR |
| 1468 | STLRRVEAKGR |
| 1469 | LALLLSGAAR |
| 1470 | YVDWIRSTLR |
| 1471 | NVVLGAHNVR |
| 1472 | NVTVVTFFCR |
| 1473 | RVALYVDWIR |
| 1474 | ATRLFPDFFTR |

TABLE 148
Pr3 HLA-B*07:02 Epitope Peptides

| SEQ ID NO. | Sequence |
|---|---|
| 1475 | FPDFFTRVAL |
| 1476 | PPSPALASVL |
| 1477 | IPQRLVNVVL |
| 1478 | QPVPHGTQCL |
| 1479 | VPHGTQCLAM |
| 1480 | DPPAQVLQEL |
| 1481 | SPALASVLL |
| 1482 | PPAQVLQEL |
| 1483 | AHRPPSPAL |
| 1484 | HPSFVLTAA |

TABLE 149
Pr3 HLA-B*08 Epitope Peptides

| SEQ ID NO. | Sequence |
|---|---|
| 1485 | ENKLNDVLL |
| 1486 | VPRRKAGIC |
| 1487 | CLRDIPQRL |
| 1488 | SPALASVLL |
| 1489 | PQRLVNVVL |
| 1490 | SASVATVQL |
| 1491 | VPRRKAGI |
| 1492 | ENKLNDVL |
| 1493 | VDWIRSTL |
| 1494 | DFFTRVAL |

TABLE 150
Pr3 HLA-B*15:01 (B62) Epitope Peptides

| SEQ ID NO. | Sequence |
|---|---|
| 1495 | QQHFSVAQVF |
| 1496 | SVAQVFLNNY |
| 1497 | ELNVTVVTFF |
| 1498 | RLFPDFFTRV |
| 1499 | RLVNVVLGAH |
| 1500 | KLNDVLLIQL |
| 1501 | ELNVTVVTF |
| 1502 | TQEPTQQHF |
| 1503 | GIIQGIDSF |
| 1504 | ALASVLLAL |

TABLE 151
Pr3 HLA-B*18 Epitope Peptides

| SEQ ID NO. | Sequence |
|---|---|
| 1505 | AENKLNDVL |
| 1506 | DFFTRVALY |
| 1507 | ATRLFPDFF |
| 1508 | GGTLIHPSF |
| 1509 | QEPTQQHF |
| 1510 | LNVTVVTF |
| 1511 | QELNVTVV |
| 1512 | NDVLLIQL |
| 1513 | PRRKAGICF |
| 1514 | CATRLFPDF |

TABLE 152
Pr3 HLA-B*27:05 Epitope Peptides

| SEQ ID NO. | Sequence |
|---|---|
| 1515 | TRLFPDFFTR |
| 1516 | SRPYMASLQM |
| 1517 | VRTQEPTQQH |
| 1518 | ARAAEIVGGH |
| 1519 | CRPHNICTF |
| 1520 | PRRKAGICF |
| 1521 | GIIQGIDSF |
| 1522 | MRGNPGSHF |
| 1523 | LRRVEAKGR |
| 1524 | RRVEAKGRP |

TABLE 153
Pr3 HLA-B*35:01 Epitope Peptides

| SEQ ID NO. | Sequence |
|---|---|
| 1525 | FPDFFTRVAL |
| 1526 | IPQRLVNVVL |
| 1527 | PPSPALASVL |
| 1528 | DPPAQVLQEL |
| 1529 | QPVPHGTQCL |
| 1530 | VPRRKAGICF |
| 1531 | SPALASVLL |
| 1532 | PPAQVLQEL |
| 1533 | GPLICDGII |
| 1534 | RPYMASLQM |

TABLE 154
Pr3 HLA-B*58:02 Epitope Peptides

| SEQ ID NO. | Sequence |
|---|---|
| 1535 | RTQEPTQQHF |
| 1536 | LTAAHCLRDI |
| 1537 | PSPALASVLL |
| 1538 | LSGAARAAEI |
| 1539 | GSHFCGGTLI |
| 1540 | ASVLLALLL |
| 1541 | EAQPHSRPY |
| 1542 | HSRPYMASL |
| 1543 | RVALYVDWI |
| 1544 | CATRLFPDF |

TABLE 155
Pr3 HLA-DRB1*0101 Epitope Peptides

| SEQ ID NO. | Sequence |
|---|---|
| 1545 | AMGWGRVGAHDPPAQ |
| 1546 | SVLLALLLSGAARAA |
| 1547 | NDVLLIQLSSPANLS |
| 1548 | HPSFVLTAAHCLRDI |
| 1549 | DGIIQGIDSFVIWGC |
| 1550 | GICFGDSGGPLICDG |
| 1551 | ASVLLALLLSGAARA |
| 1552 | LLALLLSGAARAAEI |
| 1553 | ARAAEIVGGHEAQPH |
| 1554 | SLQMRGNPGSHFCGG |

TABLE 156
Pr3 HLA-DRB1*0301 (DR17) Epitope Peptides

| SEQ ID NO. | Sequence |
|---|---|
| 1555 | VFLNNYDAENKLNDV |
| 1556 | SPALASVLLALLLSG |
| 1557 | VLLIQLSSPANLSAS |
| 1558 | GGPLICDGIIQGIDS |
| 1559 | AAHCLRDIPQRLVNV |
| 1560 | ATRLFPDFFTRVALY |
| 1561 | SLQMRGNPGSHFCGG |
| 1562 | HFSVAQVFLNNYDAE |
| 1563 | PAQVLQELNVTVVTF |
| 1564 | RVALYVDWIRSTLRR |

TABLE 157
Pr3 HLA-DRB1*0401 (DR4Dw4) Epitope Peptides

| SEQ ID NO. | Sequence |
|---|---|
| 1565 | TRLFPDFFTRVALYV |
| 1566 | SVLLALLLSGAARAA |
| 1567 | AHCLRDIPQRLVNVV |
| 1568 | VNVVLGAHNVRTQEP |
| 1569 | DVLLIQLSSPANLSA |
| 1570 | PAQVLQELNVTVVTF |
| 1571 | VTVVTFFCRPHNICT |
| 1572 | DGIIQGIDSFVIWGC |
| 1573 | QQHFSVAQVFLNNYD |
| 1574 | VTFFCRPHNICTFVP |

TABLE 158
Pr3 HLA-DRB1*0701 Epitope Peptides

| SEQ ID NO. | Sequence |
|---|---|
| 1575 | DGIIQGIDSFVIWGC |
| 1576 | HPSFVLTAAHCLRDI |
| 1577 | GICFGDSGGPLICDG |
| 1578 | YVDWIRSTLRRVEAK |
| 1579 | AHCLRDIPQRLVNVV |
| 1580 | VLLIQLSSPANLSAS |
| 1581 | PAQVLQELNVTVVTF |
| 1582 | LQELNVTVVTFFCRP |
| 1583 | CDGIIQGIDSFVIWG |
| 1584 | SFVIWGCATRLFPDF |

TABLE 159
Pr3 HLA-DRB1*1101 Epitope Peptides

| SEQ ID NO. | Sequence |
|---|---|
| 1585 | HNICTFVPRRKAGIC |
| 1586 | FVIWGCATRLFPDFF |
| 1587 | AMGWGRVGAHDPPAQ |
| 1588 | VVTFFCRPHNICTFV |
| 1589 | DWIRSTLRRVEAKGR |
| 1590 | PDFFTRVALYVDWIR |
| 1591 | ASVLLALLLSGAARA |
| 1592 | SVLLALLLSGAARAA |
| 1593 | SRPYMASLQMRGNPG |
| 1594 | LNNYDAENKLNDVLL |

TABLE 160
Pr3 HLA-DRB1*1501 (DR2b) Epitope Peptides

| SEQ ID NO. | Sequence |
|---|---|
| 1595 | QVFLNNYDAENKLND |
| 1596 | PHNICTFVPRRKAGI |
| 1597 | TRLFPDFFTRVALYV |
| 1598 | VNVVLGAHNVRTQEP |
| 1599 | LIQLSSPANLSASVA |
| 1600 | PAQVLQELNVTVVTF |
| 1601 | NVTVVTFFCRPHNIC |
| 1602 | VTVVTFFCRPHNICT |
| 1603 | DGIIQGIDSFVIWGC |
| 1604 | IQGIDSFVIWGCATR |

[0272] Cyclin-A1 Antigenic Peptides

[0273] In some embodiments, the TVM composition includes Cyclin-A1 specific T-cells. Cyclin-A1 specific T-cells can be generated as described below using one or more antigenic peptides to Cyclin-A1. In some embodiments, the Cyclin-A1 specific T-cells are generated using one or more antigenic peptides to Cyclin-A1, or a modified or heteroclitic peptide derived from a Cyclin-A1 peptide. In some embodiments, Cyclin-A1 specific T-cells are generated using a Cyclin-A1 antigen library comprising a pool of peptides (for example 15mers) containing amino acid overlap (for example 11 amino acids of overlap) between each sequence formed by scanning the protein amino acid sequence SEQ. ID. No. 1605 (UniProt KB—P78396) for Cyclin-A1:

METGFPAIMYPGSFIGGWGEEYLSWEGPGLPDFVFQQQPVESEAMHCSNP
KSGVVLATVARGPDACQILTRAPLGQDPPQRTVLGLLTANGQYRRTCGQG
ITRIRCYSGSENAFPPAGKKALPDCGVQEPPKQGFDIYMDELEQGDRDSC
SVREGMAFEDVYEVDTGTLKSDLHFLLDFNTVSPMLVDSSLLSQSEDISS
LGTDVINVTEYAEEIYQYLREAEIRHRPKAHYMKKQPDITEGMRTILVDW
LVEVGEEYKLRAETLYLAVNFLDRFLSCMSVLRGKLQLVGTAAMLLASKY
EEIYPPEVDEFVYITDDTYTKRQLLKMEHLLLKVLAFDLTVPTTNQFLLQ
YLRRQGVCVRTENLAKYVAELSLLEADPFLKYLPSLIAAAAFCLANYTVN
KHFWPETLAAFTGYSLSEIVPCLSELHKAYLDIPHRPQQAIREKYKASKY
LCVSLMEPPAVLLLQ.

[0274] In some embodiments, the Cyclin-A1 specific T-cells are generated using one or more antigenic peptides to Cyclin-A1, or a modified or heteroclitic peptide derived from a Cyclin-A1 peptide. In some embodiments, the Cyclin-A1 specific T-cells are generated with peptides that recognize class I MHC molecules. In some embodiments, the Cyclin-A1 specific T-cells are generated with peptides that recognize class II MHC molecules. In some embodiments, the Cyclin-A1 specific T-cells are generated with peptides that recognize both class I and class II MHC molecules.

[0275] In some embodiments, the Cyclin-A1 peptides used to prime and expand a T-cell subpopulation includes specifically selected HLA-restricted peptides generated by determining the HLA profile of the donor source, and including peptides derived from Cyclin-A1 that best match the donor's HLA. In some embodiments, the Cyclin-A1 peptides used to prime and expand a T-cell subpopulation are derived from HLA-restricted peptides selected from at least one or more of an HLA-A restricted peptide, HLA-B restricted peptide, or HLA-DR restricted peptide. Suitable methods for generating HLA-restricted peptides from an antigen have been described in, for example, Rammensee, HG., Bachmann, J., Emmerich, N. et al., SYFPEITHI: database for MHC ligands and peptide motifs. Immunogenetics (1999) 50: 213. https://doi.org/10.1007/s002510050595.

[0276] As provided herein, the HLA profile of a donor cell source can be determined, and T-cell subpopulations targeting Cyclin-A1 derived, wherein the T-cell subpopulation is primed and expanded using a group of peptides that are HLA-restricted to the donor's HLA profile. In certain embodiments, the T-cell subpopulation is exposed to a peptide mix that includes one or more HLA-A restricted, HLA-B restricted, and HLA-DR restricted peptides. In certain embodiments, the T-cell subpopulation is exposed to a peptide mix that includes HLA-A restricted, HLA-B restricted, and HLA-DR restricted peptides, wherein the HLA-A matched peptides are selected from the peptides of Tables 161-167, the HLA-B peptides are selected from the peptides of Tables 168-174, and the HLA-DR peptides are selected from the peptides of Tables 175-180. For example, if the donor cell source has an HLA profile that is HLA-A*01/*02:01; HLA-B*15:01/*18; and HLA-DRB1*0101/*0301, then the Cyclin-A1 peptides used to prime and expand the Cyclin-A1 specific T-cell subpopulation are restricted to the specific HLA profile, and may include the peptides identified in Table 161 (Seq. ID. Nos. 1606-1615) for HLA-A*01; Table 162 (Seq. ID. Nos. 1616-1626) for HLA-A*02:01; Table 170 (Seq. ID. Nos. 1698-1707) for HLA-B*15:01; Table 171 (Seq. ID. Nos. 1708-1717) for HLA-B*18; Table 175 (Seq. ID. Nos. 1747-1756) for HLA-DRB1*0101; and Table 176 (Seq. ID. Nos. 1757-1766) for HLA-DRB1*0301. In some embodiments, the mastermix of peptides includes both an overlapping peptide library and specifically selected HLA-restricted peptides generated by determining the HLA profile of the donor source.

[0277] In some embodiments, the Cyclin-A HLA-restricted epitopes are specific to at least both of the donor's HLA-A alleles, at least both of the donor's HLA-B alleles, and at least both of the donor's HLA-DR alleles. In some embodiments, the Cyclin-A HLA-A alleles are selected from a group comprising HLA-A*01, HLA-A*02:01, HLA-A*03, HLA-A*11:01, HLA-A*24:02, HLA-A*26, or HLA-A*68:01, and the corresponding Cyclin-A HLA-restricted peptides are selected for: HLA-A*01 from Table 161; HLA-A*02:01 from Table 162; HLA-A*03 from Table 163; HLA-A*11:01 from Table 164; HLA-A*24:02 from Table 165; HLA-A*26 from Table 166; or HLA-A*68:01 from Table 167; or any combination thereof. In some embodiments, the Cyclin-A HLA-B alleles are selected from a group comprising HLA-B*07:02, HLA-B*08, HLA-B*15:01 (B62), HLA-B*18, HLA-B*27:05, HLA-B*35:01, or HLA-B*58:02, and the corresponding Cyclin-A HLA-restricted peptides are selected for: HLA-B*07:02 from Table 168; HLA-B*08 from Table 169; HLA-B*15:01 (B62) from Table 170; HLA-B*18 from Table 171; HLA-B*27:05 from Table 172; HLA-B*35:01 from Table 173, or HLA-B*58:02 from Table 174; or any combination thereof. In some embodiments, the Cyclin-A HLA-DR alleles are selected from a group comprising HLA-DRB1*0101, HLA-DRB1*0301 (DR17), HLA-DRB1*0401 (DR4Dw4), HLA-DRB1*0701, HLA-DRB1*1101, or HLA-DRB1*1501 (DR2b) and the corresponding Cyclin-A HLA-restricted peptides are selected for: HLA-DRB1*0101 from Table 175; HLA-DRB1*0301 (DR17) from Table 176; HLA-DRB1*0401 (DR4Dw4) from Table 177; HLA-DRB1*0701 from Table 178; HLA-DRB1*1101 from Table 179; or HLA-DRB1*1501 (DR2b) from Table 180; or any combination thereof.

TABLE 161
Cyclin A1 HLA-A*01 Epitope Peptides

| SEQ ID NO. | Sequence |
|---|---|
| 1606 | VTEYAEEIYQY |
| 1607 | VREGMAFEDVY |
| 1608 | WPETLAAFTGY |
| 1609 | GTAAMLLASKY |
| 1610 | GTDVINVTEY |
| 1611 | LLEADPFLKY |
| 1612 | PTTNQFLLQY |
| 1613 | IREKYKASKY |
| 1614 | TTNQFLLQY |
| 1615 | PPEVDEFVY |
| 1616 | AAMLLASKY |

TABLE 162
Cyclin A1 HLA-A*02:01 Epitope Peptides

| SEQ ID NO. | Sequence |
|---|---|
| 1617 | TILVDWLVEV |
| 1618 | GMAFEDVYEV |
| 1619 | SLMEPPAVLL |
| 1620 | NLAKYVAEL |
| 1621 | SLSEIVPCL |
| 1622 | VLRGKLQLV |
| 1623 | SLLEADPFL |
| 1624 | SLGTDVINV |
| 1625 | TLYLAVNFL |
| 1626 | KMEHLLLKV |

TABLE 163
Cyclin A1 HLA-A*03 Epitope Peptides

| SEQ ID NO. | Sequence |
|---|---|
| 1627 | AIREKYKASK |
| 1628 | SLLEADPFLK |
| 1629 | IVPCLSELHK |
| 1630 | LLKMEHLLLK |
| 1631 | YLRRQGVCVR |
| 1632 | CVRTENLAK |
| 1633 | CLANYTVNK |
| 1634 | FVYITDDTY |
| 1635 | ALPDCGVQE |
| 1636 | FIGGWGEEY |
| 1637 | SVLRGKLQL |

TABLE 164
Cyclin A1 HLA-A*11:01 Epitope Peptides

| SEQ ID NO. | Sequence |
|---|---|
| 1638 | DTYTKRQLLK |
| 1639 | GTAAMLLASK |
| 1640 | IVPCLSELHK |
| 1641 | SLLEADPFLK |
| 1642 | LLKMEHLLLK |
| 1643 | GVVLATVAR |
| 1644 | CVRTENLAK |
| 1645 | RTCGQGITR |
| 1646 | LVEVGEEYK |
| 1647 | YLAVNFLDR |

TABLE 165
Cyclin A1 HLA-A*24:02 Epitope Peptides

| SEQ ID NO. | Sequence |
|---|---|
| 1648 | EYLSWEGPGL |
| 1649 | EYAEEIYQYL |
| 1650 | PFLKYLPSLI |
| 1651 | IYQYLREAEI |
| 1652 | IYPPEVDEF |
| 1653 | KYVAELSLL |
| 1654 | VYEVDTGTL |
| 1655 | HYMKKQPDI |
| 1656 | EYKLRAETL |
| 1657 | CYSGSENAF |

TABLE 166
Cyclin A1 HLA-A*26 Epitope Peptides

| SEQ ID NO. | Sequence |
|---|---|
| 1658 | DVYEVDTGTL |
| 1659 | ETLYLAVNFL |
| 1660 | EIYPPEVDEF |
| 1661 | DPFLKYLPSL |
| 1662 | EIVPCLSEL |
| 1663 | ETGFPAIMY |
| 1664 | ETLAAFTGY |
| 1665 | EYAEEIYQY |
| 1666 | DTGTLKSDL |
| 1667 | EVDEFVYIT |

TABLE 167
Cyclin A1 HLA-A*68:01 Epitope Peptides

| SEQ ID NO. | Sequence |
|---|---|
| 1668 | DVYEVDTGTLK |
| 1669 | DIPHRPQQAIR |
| 1670 | DTYTKRQLLK |
| 1671 | TAAMLLASK |
| 1672 | ITDDTYTKR |
| 1673 | GVVLATVAR |
| 1674 | EVGEEYKLR |
| 1675 | RTCGQGITR |
| 1676 | DACQILTRA |
| 1677 | KAYLDIPHR |

TABLE 168
Cyclin A1 HLA-B*07:02 Epitope Peptides

| SEQ ID NO. | Sequence |
|---|---|
| 1678 | DPPQRTVLGL |
| 1679 | SPMLVDSSLL |
| 1680 | DPFLKYLPSL |
| 1681 | NPKSGVVLAT |
| 1682 | LPSLIAAAAF |
| 1683 | PPQRTVLGL |
| 1684 | FPPAGKKAL |
| 1685 | GPGLPDFVF |
| 1686 | IPHRPQQAI |
| 1687 | VPTTNQFLL |

TABLE 169
Cyclin A1 HLA-B*08 Epitope Peptides

| SEQ ID NO. | Sequence |
|---|---|
| 1688 | EYKLRAETL |
| 1689 | LLKVLAFDL |
| 1690 | TLKSDLHFL |
| 1691 | LLKMEHLLL |
| 1692 | HLLLKVLAF |
| 1693 | VLRGKLQL |
| 1694 | FLKYLPSL |
| 1695 | NPKSGVVL |
| 1696 | PPAGKKAL |
| 1697 | LAKYVAEL |

TABLE 170
Cyclin A1 HLA-B*15:01 (B62) Epitope Peptides

| SEQ ID NO. | Sequence |
|---|---|
| 1698 | CVRTENLAKY |
| 1699 | GQGITRIRCY |
| 1700 | LLASKYEEIY |
| 1701 | LLEADPFLKY |
| 1702 | WLVEVGEEY |
| 1703 | PQQAIREKY |
| 1704 | CLSELHKAY |
| 1705 | GLLTANGQY |
| 1706 | HLLLKVLAF |
| 1707 | VQEPPKQGF |

TABLE 171
Cyclin A1 HLA-B*18 Epitope Peptides

| SEQ ID NO. | Sequence |
|---|---|
| 1708 | MEHLLLKVL |
| 1709 | WEGPGLPDF |
| 1710 | LEADPFLKY |
| 1711 | REKYKASKY |
| 1712 | PEVDEFVY |
| 1713 | YEVDTGTL |
| 1714 | QEPPKQGF |
| 1715 | TEYAEEIY |
| 1716 | AEEIYQYL |
| 1717 | TEGMRTIL |

TABLE 172
Cyclin A1 HLA-B*27:05 Epitope Peptides

| SEQ ID NO. | Sequence |
|---|---|
| 1718 | RRTCGQGITR |
| 1719 | DRFLSCMSVL |
| 1720 | HRPQQAIREK |
| 1721 | HRPKAHYMKK |
| 1722 | IREKYKASKY |
| 1723 | KRQLLKMEHL |
| 1724 | LRRQGVCVR |
| 1725 | IREKYKASK |
| 1726 | KRQLLKMEH |
| 1727 | LREAEIRHR |

TABLE 173
Cyclin A1 HLA-B*35:01 Epitope Peptides

| SEQ ID NO. | Sequence |
|---|---|
| 1728 | PPQRTVLGLL |
| 1729 | EPPKQGFDIY |
| 1730 | SPMLVDSSLL |
| 1731 | DPFLKYLPSL |
| 1732 | LPSLIAAAAF |
| 1733 | FPPAGKKAL |
| 1734 | DPPQRTVLGL |
| 1735 | RPQQAIREKY |
| 1736 | FPAIMYPGSF |

TABLE 174
Cyclin A1 HLA-B*58:02 Epitope Peptides

| SEQ ID NO. | Sequence |
|---|---|
| 1737 | KSDLHFLLDF |
| 1738 | KASKYLCVSL |
| 1739 | RTCGQGITRI |
| 1740 | LAVNFLDRFL |
| 1741 | YSLSEIVPCL |
| 1742 | CSNPKSGVVL |
| 1743 | SSLLSQSEDI |
| 1744 | VSLMEPPAVL |
| 1745 | LSLLEADPF |
| 1746 | PSLIAAAAF |

TABLE 175
Cyclin A1 HLA-DRB1*0101 Epitope Peptides

| SEQ ID NO. | Sequence |
|---|---|
| 1747 | VAELSLLEADPFLKY |
| 1748 | EHLLLKVLAFDLTVP |
| 1749 | LKYLPSLIAAAAFCL |
| 1750 | LLDFNTVSPMLVDSS |
| 1751 | SEDISSLGTDVINVT |
| 1752 | DPFLKYLPSLIAAAA |
| 1753 | NGQYRRTCGQGITRI |
| 1754 | RGKLQLVGTAAMLLA |
| 1755 | ASKYEEIYPPEVDEF |
| 1756 | YLCVSLMEPPAVLLL |

TABLE 176
Cyclin A1 HLA-DRB1*0301 (DR17) Epitope Peptides

| SEQ ID NO. | Sequence |
|---|---|
| 1757 | TGTLKSDLHFLLDFN |
| 1758 | LSLLEADPFLKYLPS |
| 1759 | DCGVQEPPKQGFDIY |
| 1760 | DLHFLLDFNTVSPML |
| 1761 | EAEIRHRPKAHYMKK |
| 1762 | VINVTEYAEEIYQYL |
| 1763 | QPDITEGMRTILVDW |
| 1764 | DWLVEVGEEYKLRAE |
| 1765 | VPCLSELHKAYLDIP |
| 1766 | GSFIGGWGEEYLSWE |

TABLE 177
Cyclin A1 HLA-DRB1*0401 (DR4Dw4) Epitope Peptides

| SEQ ID NO. | Sequence |
|---|---|
| 1767 | DLHFLLDFNTVSPML |
| 1768 | EFVYITDDTYTKRQL |
| 1769 | HKAYLDIPHRPQQAI |
| 1770 | FEDVYEVDTGTLKSD |
| 1771 | TGTLKSDLHFLLDFN |
| 1772 | VSPMLVDSSLLSQSE |
| 1773 | SEDISSLGTDVINVT |
| 1774 | YLAVNFLDRFLSCMS |
| 1775 | VNFLDRFLSCMSVLR |
| 1776 | RGKLQLVGTAAMLLA |

TABLE 178
Cyclin A1 HLA-DRB1*0701 Epitope Peptides

| SEQ ID NO. | Sequence |
|---|---|
| 1777 | VDEFVYITDDTYTKR |
| 1778 | NGQYRRTCGQGITRI |
| 1779 | ENAFPPAGKKALPDC |
| 1780 | FEDVYEVDTGTLKSD |
| 1781 | FLLDFNTVSPMLVDS |
| 1782 | SEDISSLGTDVINVT |
| 1783 | EEIYQYLREAEIRHR |
| 1784 | RGKLQLVGTAAMLLA |
| 1785 | KLQLVGTAAMLLASK |
| 1786 | ASKYEEIYPPEVDEF |

TABLE 179
Cyclin A1 HLA-DRB1*1101 Epitope Peptides

| SEQ ID NO. | Sequence |
|---|---|
| 1787 | YLAVNFLDRFLSCMS |
| 1788 | LANYTVNKHFWPETL |
| 1789 | HKAYLDIPHRPQQAI |
| 1790 | ETGFPAIMYPGSFIG |
| 1791 | LVEVGEEYKLRAETL |
| 1792 | ASKYLCVSLMEPPAV |
| 1793 | KRQLLKMEHLLLKVL |
| 1794 | LKMEHLLLKVLAFDL |
| 1795 | NQFLLQYLRRQGVCV |
| 1796 | CVRTENLAKYVAELS |

TABLE 180
Cyclin A1 HLA-DRB1*1501 (DR2b) Epitope Peptides

| SEQ ID NO. | Sequence |
|---|---|
| 1797 | YLAVNFLDRFLSCMS |
| 1798 | LANYTVNKHFWPETL |
| 1799 | HKAYLDIPHRPQQAI |
| 1800 | ETGFPAIMYPGSFIG |
| 1801 | LVEVGEEYKLRAETL |
| 1802 | ASKYLCVSLMEPPAV |
| 1803 | KRQLLKMEHLLLKVL |
| 1804 | LKMEHLLLKVLAFDL |
| 1805 | NQFLLQYLRRQGVCV |
| 1806 | CVRTENLAKYVAELS |

[0278] Neutrophil Elastase Antigenic Peptides

[0279] In some embodiments, the TVM composition includes neutrophil elastase specific T-cells. neutrophil elastase specific T-cells can be generated as described below using one or more antigenic peptides to neutrophil elastase. In some embodiments, the neutrophil elastase specific T-cells are generated using one or more antigenic peptides to neutrophil elastase, or a modified or heteroclitic peptide derived from a neutrophil elastase peptide. In some embodiments, neutrophil elastase specific T-cells are generated using a neutrophil elastase antigen library comprising a pool of peptides (for example 15mers) containing amino acid overlap (for example 11 amino acids of overlap) between each sequence formed by scanning the protein amino acid sequence SEQ. ID. No. 1807 (UniProt KB—P08246) for neutrophil elastase:

MTLGRRLACLFLACVLPALLLGGTALASEIVGGRRARPHAWPFMVSLQLR
GGHFCGATLIAPNFVMSAAHCVANVNVRAVRVVLGAHNLSRREPTRQVFA
VQRIFENGYDPVNLLNDIVILQLNGSATINANVQVAQLPAQGRRLGNGVQ
CLAMGWGLLGRNRGIASVLQELNVTVVTSLCRRSNVCTLVRGRQAGVCFG
DSGSPLVCNGLIFIGIASFVRGGCASGLYPDAFAPVAQFVNWIDSIIQRS
EDNPCPHPRDPDPASRTH.

[0280] In some embodiments, the neutrophil elastase specific T-cells are generated using one or more antigenic peptides to neutrophil elastase, or a modified or heteroclitic peptide derived from a neutrophil elastase peptide. In some embodiments, the neutrophil elastase specific T-cells are generated with peptides that recognize class I MHC molecules. In some embodiments, the neutrophil elastase specific T-cells are generated with peptides that recognize class II MHC molecules. In some embodiments, the neutrophil elastase specific T-cells are generated with peptides that recognize both class I and class II MHC molecules.

[0281] In some embodiments, the neutrophil elastase peptides used to prime and expand a T-cell subpopulation includes specifically selected HLA-restricted peptides generated by determining the HLA profile of the donor source, and including peptides derived from neutrophil elastase that best match the donor's HLA. In some embodiments, the neutrophil elastase peptides used to prime and expand a T-cell subpopulation are derived from HLA-restricted peptides selected from at least one or more of an HLA-A restricted peptide, HLA-B restricted peptide, or HLA-DR restricted peptide. Suitable methods for generating HLA-restricted peptides from an antigen have been described in, for example, Rammensee, HG., Bachmann, J., Emmerich, N. et al., SYFPEITHI: database for MHC ligands and peptide motifs. Immunogenetics (1999) 50: 213. https://doi.org/10.1007/s002510050595.

[0282] As provided herein, the HLA profile of a donor cell source can be determined, and T-cell subpopulations targeting neutrophil elastase derived, wherein the T-cell subpopulation is primed and expanded using a group of peptides that are HLA-restricted to the donor's HLA profile. In certain embodiments, the T-cell subpopulation is exposed to a peptide mix that includes one or more HLA-A restricted, HLA-B restricted, and HLA-DR restricted peptides. In certain embodiments, the T-cell subpopulation is exposed to a peptide mix that includes HLA-A restricted, HLA-B restricted, and HLA-DR restricted peptides, wherein the HLA-A matched peptides are selected from the peptides of Tables 181-187, the HLA-B peptides are selected from the peptides of Tables 188-194, and the HLA-DR peptides are selected from the peptides of Tables 195-200. For example, if the donor cell source has an HLA profile that is HLA-A*01/*02:01; HLA-B*15:01/*18; and HLA-DRB1*0101/*0301, then the neutrophil elastase peptides used to prime and expand the neutrophil elastase specific T-cell subpopulation are restricted to the specific HLA profile, and may include the peptides identified in Table 181 (Seq. ID. Nos. 1808-1817) for HLA-A*01; Table 182 (Seq. ID. Nos. 1818-1827) for HLA-A*02:01; Table 190 (Seq. ID. Nos. 1989-1907) for HLA-B*15:01; Table 191 (Seq. ID. Nos. 1908-1917) for HLA-B*18; Table 195 (Seq. ID. Nos. 1948-1957) for HLA-DRB1*0101; and Table 196 (Seq. ID. Nos. 1958-1967) for HLA-DRB1*0301. In some embodiments, the mastermix of peptides includes both an overlapping peptide library and specifically selected HLA-restricted peptides generated by determining the HLA profile of the donor source.

[0283] In some embodiments, the neutrophil elastase HLA-restricted epitopes are specific to at least both of the donor's HLA-A alleles, at least both of the donor's HLA-B alleles, and at least both of the donor's HLA-DR alleles. In some embodiments, the neutrophil elastase HLA-A alleles are selected from a group comprising HLA-A*01, HLA-A*02:01, HLA-A*03, HLA-A*11:01, HLA-A*24:02, HLA-A*26, or HLA-A*68:01, and the corresponding neutrophil elastase HLA-restricted peptides are selected for: HLA-A*01 from Table 181; HLA-A*02:01 from Table 182; HLA-A*03 from Table 183; HLA-A*11:01 from Table 184; HLA-A*24:02 from Table 185; HLA-A*26 from Table 186; or HLA-A*68:01 from Table 187; or any combination thereof. In some embodiments, the neutrophil elastase HLA-B alleles are selected from a group comprising HLA-B*07:02, HLA-B*08, HLA-B*15:01 (B62), HLA-B*18, HLA-B*27:05, HLA-B*35:01, or HLA-B*58:02, and the corresponding neutrophil elastase HLA-restricted peptides are selected for: HLA-B*07:02 from Table 188; HLA-B*08 from Table 189; HLA-B*15:01 (B62) from Table 190; HLA-B*18 from Table 191; HLA-B*27:05 from Table 192; HLA-B*35:01 from Table 193, or HLA-B*58:02 from Table 194; or any combination thereof. In some embodiments, the neutrophil elastase HLA-DR alleles are selected from a group comprising HLA-DRB1*0101, HLA-DRB1*0301 (DR17), HLA-DRB1*0401 (DR4Dw4), HLA-DRB1*0701, HLA-DRB1*1101, or HLA-DRB1*1501 (DR2b) and the corresponding neutrophil elastase HLA-restricted peptides are selected for: HLA-DRB1*0101 from Table 195; HLA-DRB1*0301 (DR17) from Table 196; HLA-DRB1*0401 (DR4Dw4) from Table 197; HLA-DRB1*0701 from Table 198; HLA-DRB1*1101 from Table 199; or HLA-DRB1*1501 (DR2b) from Table 200; or any combination thereof.

TABLE 181
Neutrophil Elastase HLA-A*01 Epitope Peptides

| SEQ ID NO. | Sequence |
|---|---|
| 1808 | FVRGGCASGLY |
| 1809 | FAVQRIFENGY |
| 1810 | AVQRIFENGY |
| 1811 | GYDPVNLLND |
| 1812 | VRGGCASGLY |
| 1813 | ASEIVGGRRA |
| 1814 | FGDSGSPLVC |
| 1815 | VQRIFENGY |
| 1816 | RGGCASGLY |
| 1817 | LNDIVILQL |

TABLE 182
Neutrophil Elastase HLA-A*02:01 Epitope Peptides

| SEQ ID NO. | Sequence |
|---|---|
| 1818 | LLNDIVILQL |
| 1819 | RLACLFLACV |
| 1820 | GLYPDAFAPV |
| 1821 | FLACVLPAL |
| 1822 | NLLNDIVIL |
| 1823 | VLQELNVTV |
| 1824 | ALLLGGTAL |
| 1825 | GIASVLQEL |
| 1826 | TLGRRLACL |
| 1827 | LLLGGTALA |

TABLE 183
Neutrophil Elastase HLA-A*03 Epitope Peptides

| SEQ ID NO. | Sequence |
|---|---|
| 1828 | VVLGAHNLSR |
| 1829 | LVRGRQAGVC |
| 1830 | AVQRIFENGY |
| 1831 | NVRAVRVVL |
| 1832 | GLIHGIASF |
| 1833 | ALLLGGTAL |
| 1834 | AVRVVLGAH |
| 1835 | NLSRREPTR |
| 1836 | SLQLRGGHF |
| 1837 | FVRGGCASG |

TABLE 184
Neutrophil Elastase HLA-A*11:01 Epitope Peptides

| SEQ ID NO. | Sequence |
|---|---|
| 1838 | VVLGAHNLSR |
| 1839 | PTRQVFAVQR |
| 1840 | NVTVVTSLCR |
| 1841 | ALASEIVGGR |
| 1842 | QVAQLPAQGR |
| 1843 | RSNVCTLVR |
| 1844 | VTVVTSLCR |
| 1845 | ASEIVGGRR |
| 1846 | AMGWGLLGR |
| 1847 | NVCTLVRGR |

TABLE 185
Neutrophil Elastase HLA-A*24:02 Epitope Peptides

| SEQ ID NO. | Sequence |
|---|---|
| 1848 | LFLACVLPAL |
| 1849 | VSLQLRGGHF |
| 1850 | VNLLNDIVIL |
| 1851 | QCLAMGWGLL |
| 1852 | GSPLVCNGLI |
| 1853 | CFGDSGSPL |
| 1854 | QFVNWIDSI |
| 1855 | NGYDPVNLL |
| 1856 | GYDPVNLLN |
| 1857 | LYPDAFAPV |

TABLE 186
Neutrophil Elastase HLA-A*26 Epitope Peptides

| SEQ ID NO. | Sequence |
|---|---|
| 1858 | ELNVTVVTSL |
| 1859 | ENGYDPVNLL |
| 1860 | MTLGRRLACL |
| 1861 | AVQRIFENGY |
| 1862 | DIVILQLNGS |
| 1863 | FVRGGCASGL |
| 1864 | DAFAPVAQF |
| 1865 | RVVLGAHNL |
| 1866 | QVFAVQRIF |
| 1867 | EIVGGRRAR |

TABLE 187
Neutrophil Elastase HLA-A*68:01 Epitope Peptides

| SEQ ID NO. | Sequence |
|---|---|
| 1868 | CVANVNVRAVR |
| 1869 | FVNWIDSIIQR |
| 1870 | QVAQLPAQGRR |
| 1871 | PTRQVFAVQR |
| 1872 | VANVNVRAVR |
| 1873 | TVVTSLCRR |
| 1874 | LASEIVGGR |
| 1875 | NVCTLVRGR |
| 1876 | NWIDSIIQR |
| 1877 | EIVGGRRAR |

TABLE 188
Neutrophil Elastase HLA-B*07:02 Epitope Peptides

| SEQ ID NO. | Sequence |
|---|---|
| 1878 | APVAQFVNWI |
| 1879 | CPHPRDPDPA |
| 1880 | LPALLLGGTA |
| 1881 | WPFMVSLQL |
| 1882 | YPDAFAPVA |
| 1883 | APNFVMSAA |
| 1884 | EPTRQVFAV |
| 1885 | RPHAWPFMV |
| 1886 | ACVLPALLL |
| 1887 | NVRAVRVVL |

TABLE 189
Neutrophil Elastase HLA-B*08 Epitope Peptides

| SEQ ID NO. | Sequence |
|---|---|
| 1888 | TLGRRLACL |
| 1889 | SLQLRGGHF |
| 1890 | GLLGRNRGI |
| 1891 | GRRLACLFL |
| 1892 | FLACVLPAL |
| 1893 | ALLLGGTAL |
| 1894 | NLLNDIVIL |
| 1895 | VRAVRVVL |
| 1896 | SPLVCNGL |
| 1897 | CLFLACVL |

TABLE 190
Neutrophil Elastase HLA-B*15:01 (B62) Epitope
Peptides

| SEQ ID NO. | Sequence |
|---|---|
| 1898 | RQVFAVQRIF |
| 1899 | TLGRRLACLF |
| 1900 | AVQRIFENGY |
| 1901 | ALLLGGTALA |
| 1902 | ILQLNGSATI |
| 1903 | RLGNGVQCLA |
| 1904 | VQRIFENGY |
| 1905 | GLIHGIASF |
| 1906 | SLQLRGGHF |
| 1907 | QVFAVQRIF |

TABLE 191
Neutrophil Elastase HLA-B*18 Epitope Peptides

| SEQ ID NO. | Sequence |
|---|---|
| 1908 | DAFAPVAQF |
| 1909 | LGRRLACLF |
| 1910 | NVRAVRVVL |
| 1911 | ASGLYPDAF |
| 1912 | ACLFLACVL |
| 1913 | GATLIAPNF |
| 1914 | REPTRQVF |
| 1915 | QELNVTVV |
| 1916 | ANVQVAQL |
| 1917 | ACVLPALL |

TABLE 192
Neutrophil Elastase HLA-B*27:05 Epitope Peptides

| SEQ ID NO. | Sequence |
|---|---|
| 1918 | RRLGNGVQCL |
| 1919 | RRARPHAWPF |
| 1920 | GRNRGIASVL |
| 1921 | RRSNVCTLVR |
| 1922 | VRVVLGAHNL |
| 1923 | RREPTRQVF |
| 1924 | GRRLACLFL |
| 1925 | VRGGCASGL |
| 1926 | TRQVFAVQR |
| 1927 | PRDPDPASR |

TABLE 193
Neutrophil Elastase HLA-B*35:01 Epitope Peptides

| SEQ ID NO. | Sequence |
|---|---|
| 1928 | APVAQFVNWI |
| 1929 | LFLACVLPAL |
| 1930 | VNVRAVRVVL |
| 1931 | YPDAFAPVAQ |
| 1932 | WPFMVSLQL |
| 1933 | DPVNLLNDI |
| 1934 | SPLVCNGLI |
| 1935 | ACLFLACVL |
| 1936 | NLLNDIVIL |
| 1937 | RNRGIASVL |

TABLE 194
Neutrophil Elastase HLA-B*58:02 Epitope Peptides

| SEQ ID NO. | Sequence |
|---|---|
| 1938 | RARPHAWPFM |
| 1939 | VSLQLRGGHF |
| 1940 | GSPLVCNGLI |
| 1941 | LACVLPALLL |
| 1942 | RVVLGAHNL |
| 1943 | QVFAVQRIF |
| 1944 | GATLIAPNF |
| 1945 | ASGLYPDAF |
| 1946 | GATLIAPNF |
| 1947 | ASGLYPDAF |

TABLE 195
Neutrophil Elastase HLA-DRB1*0101 Epitope Peptides

| SEQ ID NO. | Sequence |
|---|---|
| 1948 | PHAWPFMVSLQLRGG |
| 1949 | LNDIVILQLNGSATI |
| 1950 | CLFLACVLPALLLGG |
| 1951 | APNFVMSAAHCVANV |
| 1952 | ASFVRGGCASGLYPD |
| 1953 | VLPALLLGGTALASE |
| 1954 | ALASEIVGGRRARPH |
| 1955 | RAVRVVLGAHNLSRR |
| 1956 | YDPVNLLNDIVILQL |
| 1957 | NVQVAQLPAQGRRLG |

TABLE 196
Neutrophil Elastase HLA-DRB1*0301 (DR17) Epitope
Peptides

| SEQ ID NO. | Sequence |
|---|---|
| 1958 | VFAVQRIFENGYDPV |
| 1959 | PVNLLNDIVILQLNG |
| 1960 | ASGLYPDAFAPVAQF |
| 1961 | CLFLACVLPALLLGG |
| 1962 | IFENGYDPVNLLNDI |
| 1963 | IASVLQELNVTVVTS |
| 1964 | ACLFLACVLPALLLG |
| 1965 | VRVVLGAHNLSRREP |
| 1966 | VNLLNDIVILQLNGS |
| 1967 | NDIVILQLNGSATIN |

TABLE 197
Neutrophil Elastase HLA-DRB1*0401 (DR4Dw4)
Epitope Peptides

| SEQ ID NO. | Sequence |
|---|---|
| 1968 | PDAFAPVAQFVNWID |
| 1969 | PNFVMSAAHCVANVN |
| 1970 | NRGIASVLQELNVTV |
| 1971 | IASVLQELNVTVVTS |
| 1972 | VTVVTSLCRRSNVCT |
| 1973 | RSNVCTLVRGRQAGV |
| 1974 | AQFVNWIDSIIQRSE |
| 1975 | PHAWPFMVSLQLRGG |
| 1976 | AMGWGLLGRNRGIAS |
| 1977 | GVCFGDSGSPLVCNG |

TABLE 198
Neutrophil Elastase HLA-DRB1*0701 Epitope Peptides

| SEQ ID NO. | Sequence |
|---|---|
| 1978 | GVCFGDSGSPLVCNG |
| 1979 | PHAWPFMVSLQLRGG |
| 1980 | VFAVQRIFENGYDPV |
| 1981 | ILQLNGSATINANVQ |
| 1982 | APNFVMSAAHCVANV |
| 1983 | IVILQLNGSATINAN |
| 1984 | LQELNVTVVTSLCRR |
| 1985 | VAQFVNWIDSIIQRS |
| 1986 | YDPVNLLNDIVILQL |
| 1987 | VNLLNDIVILQLNGS |

TABLE 199
Neutrophil Elastase HLA-DRB1*1101 Epitope Peptides

| SEQ ID NO. | Sequence |
|---|---|
| 1988 | AMGWGLLGRNRGIAS |
| 1989 | RSNVCTLVRGRQAGV |
| 1990 | VTVVTSLCRRSNVCT |
| 1991 | ASEIVGGRRARPHAW |
| 1992 | VAQLPAQGRRLGNGV |
| 1993 | PNFVMSAAHCVANVN |
| 1994 | AVRVVLGAHNLSRRE |
| 1995 | VLGAHNLSRREPTRQ |
| 1996 | TRQVFAVQRIFENGY |
| 1997 | GWGLLGRNRGIASVL |

TABLE 200
Neutrophil Elastase HLA-DRB1*1501(DR2b) Epitope
Peptides

| SEQ ID NO. | Sequence |
|---|---|
| 1998 | PALLLGGTALASEIV |
| 1999 | VRVVLGAHNLSRREP |
| 2000 | RIFENGYDPVNLLND |
| 2001 | ILQLNGSATINANVQ |
| 2002 | VQCLAMGWGLLGRNR |
| 2003 | WGLLGRNRGIASVLQ |
| 2004 | IASVLQELNVTVVTS |
| 2005 | ELNVTVVTSLCRRSN |
| 2006 | VTSLCRRSNVCTLVR |
| 2007 | NGLIHGIASFVRGGC |

### Generation of Targeted Virus-Associated Antigen Peptides for Use in Activating T-Cell Subpopulations

[0284] T-cell subpopulations targeting one or multiple VAAs can be prepared by pulsing antigen presenting cells or artificial antigen presenting cells with a selected single peptide or epitope, several peptides or epitopes, or with peptide libraries of the selected viral-associated antigens, that for example, include peptides that are about 7, 8, 9, 10, 11, 12, 13, 14, 15, 16 or more amino acids long and overlapping one another by 5, 6, 7, 8, or 9 amino acids, in certain aspects. GMP-quality overlapping peptide libraries directed to a number of viral-associated antigens are commercially available, for example, through JPT Technologies and/or Miltenyi Biotec. In particular embodiments, the peptides are 7, 8, 9, 10, 11, 12, 13, 14, 15, 16, 17, 18, 19, 20, 21, 22, 23, 24, 25, 26, 27, 28, 29, 30, 31, 32, 33, 34, or 35 or more amino acids in length, for example, and there is overlap of 5, 6, 7, 8, 9, 10, 11, 12, 13, 14, 15, 16, 17, 18, 19, 20, 21, 22, 23, 24, 25, 26, 27, 28, 29, 30, 31, 32, 33, or 34 amino acids in length.

[0285] The VAA-targeting T-cell component of the TVM or VM can be prepared by using a multi-VAA priming and expanding approach wherein the T-cells are primed with a mastermix of one or more antigenic peptides from two or more VAAs. Alternatively, the VAA targeting T cell component of the TVM or VM can be prepared by separately priming and expanding a T-cell subpopulation to each targeted VAA, and then combining the separately primed and activated T-cell subpopulations.

[0286] In some embodiments, the T-cell subpopulation is specific to one or more known epitopes of multiple VAA. Much work has been done to determine specific epitopes of VAAs and the HLA alleles they are associated with. Non-limiting examples of specific epitopes of VAAs and the alleles they are associated with can be found in Kuzushima et al., Blood (2003) 101:1460-1468; Kondo et al., Blood (2004) 103(2): 630-638; Hanley et al., Blood (2009) 114(9): 1958-1967; and Hanley et al., Cytotherapy (2011) 13: 976-986, which are each incorporated herein by reference.

[0287] In some embodiments, the VAA peptides used to prime and expand a T-cell subpopulation includes specifically selected HLA-restricted peptides generated by determining the HLA profile of the donor source, and including peptides derived from the targeted VAA that best match the donor's HLA type. By including specifically selected donor HLA-restricted peptides in the peptide mix for priming and expanding T-cell subpopulations, a T-cell subpopulation can be generated that provides greater VAA targeted activity through more than one donor HLA, improving potential efficacy of the T-cell subpopulation. In addition, by generating a T-cell subpopulation with VAA targeted activity through more than one donor HLA allele, a single donor T-cell subpopulation may be included in a TVM or VM composition for multiple recipients with different HLA profiles by matching one or more donor HLAs showing VAA-activity. In some embodiments, the VAA peptides used to prime and expand a T-cell subpopulation are derived from HLA-restricted peptides selected from at least one or more of an HLA-A restricted peptide, HLA-B restricted peptide, or HLA-DR restricted peptide. In some embodiments, the HLA-restricted epitopes are specific to at least one or more of a cell donor's HLA-A alleles, HLA-B alleles, or HLA-DR alleles. In some embodiments, the HLA-restricted epitopes are specific to at least both of the donor's HLA-A alleles, at least both of the donor's HLA-B alleles, and at least both of the donor's HLA-DR alleles. In some embodiments, the HLA-A alleles are selected from a group comprising HLA-A*01, HLA-A*02:01, HLA-A*03, HLA-A*11:01, HLA-A*24:02, HLA-A*26, or HLA-A*68:01. In some embodiments, the HLA-B alleles are selected from a group comprising HLA-B*07:02, HLA-B*08, HLA-B*15:01 (B62), HLA-B*18, HLA-B*27:05, HLA-B*35:01, or HLA-B*58:02. In some embodiments, the HLA-DR alleles are selected from a group comprising HLA-DRB1*0101, HLA-DRB1*0301 (DR17), HLA-DRB1*0401 (DR4Dw4), HLA-DRB1*0701, HLA-DRB1*1101, or HLA-DRB1*1501 (DR2b). Suitable methods for generating HLA-restricted peptides from an antigen have been described in, for example, Rammensee, HG., Bachmann, J., Emmerich, N. et al., SYFPEITHI: database for MHC ligands and peptide motifs. Immunogenetics (1999) 50: 213. https://doi.org/10.1007/s002510050595. In some embodiments, the mastermix of peptides includes both an overlapping peptide library and specifically selected HLA-restricted peptides generated by determining the HLA profile of the donor source.

[0288] This focused approach to activation can increase the effectiveness of the activated T-cell subpopulation, and ultimately, the TVM or VM composition

[0289] Epstein-Barr Virus (EBV) Strain B95-8 LMP1 Antigenic Peptides

[0290] In some embodiments, the TVM or VM composition includes Epstein-Barr Virus (EBV) Strain B95-8 LMP1 specific T-cells. LMP1 specific T-cells can be generated as described below using one or more antigenic peptides to LMP1. In some embodiments, the LMP1 specific T-cells are generated using one or more antigenic peptides to LMP1, or a modified or heteroclitic peptide derived from a LMP1 peptide. In some embodiments, LMP1 specific T-cells are generated using a LMP1 antigen library comprising a pool of peptides (for example 15mers) containing amino acid overlap (for example 11 amino acids of overlap) between each sequence formed by scanning the protein amino acid sequence SEQ. ID. No. 2008 (UniProt KB—P03230) for EBV Strain B95-8 LMP1:

MEHDLERGPPGPRRPPRGPPLSSSLGLALLLLLLALLFWLYIVMSDWTG
GALLVLYSFALMLIIIILIIFIFRRDLLCPLGALCILLLMITLLLIALW
NLHGQALFLGIVLFIFGCLLVLGIWIYLLEMLWRLGATIWQLLAFFLAF
FLDLILLIIALYLQQNWWTLLVDLLWLLLFLAILIWMYYHGQRHSDEHH
HDDSLPHPQQATDDSGHESDSNSNEGRHHLLVSGAGDGPPLCSQNLGAP
GGGPDNGPQDPDNTDDNGPQDPDNTDDNGPHDPLPQDPDNTDDNGPQDP
DNTDDNGPHDPLPHSPSDSAGNDGGPPQLTEEVENKGGDQGPPLMTDGG
GGHSHDSGHGGGDPHLPTLLLGSSGSGGDDDDPHGPVQLSYYD.

[0291] In some embodiments, the LMP1 specific T-cells are generated using one or more antigenic peptides to LMP1, or a modified or heteroclitic peptide derived from a LMP1 peptide. In some embodiments, the LMP1 specific T-cells are generated with peptides that recognize class I MHC molecules. In some embodiments, the LMP1 specific T-cells are generated with peptides that recognize class II MHC molecules. In some embodiments, the LMP1 specific T-cells are generated with peptides that recognize both class I and class II MHC molecules.

[0292] In some embodiments, the LMP1 peptides used to prime and expand a T-cell subpopulation includes specifically selected HLA-restricted peptides generated by determining the HLA profile of the donor source, and including peptides derived from LMP1 that best match the donor's HLA. In some embodiments, the LMP1 peptides used to prime and expand a T-cell subpopulation are derived from HLA-restricted peptides selected from at least one or more of an HLA-A restricted peptide, HLA-B restricted peptide, or HLA-DR restricted peptide. Suitable methods for generating HLA-restricted peptides from an antigen have been described in, for example, Rammensee, HG., Bachmann, J., Emmerich, N. et al., SYFPEITHI: database for MHC ligands and peptide motifs. Immunogenetics (1999) 50: 213. https://doi.org/10.1007/s002510050595.

[0293] As provided herein, the HLA profile of a donor cell source can be determined, and T-cell subpopulations targeting LMP1 derived, wherein the T-cell subpopulation is primed and expanded using a group of peptides that are HLA-restricted to the donor's HLA profile. In certain embodiments, the T-cell subpopulation is exposed to a peptide mix that includes one or more HLA-A restricted, HLA-B restricted, and HLA-DR restricted peptides. In certain embodiments, the T-cell subpopulation is exposed to a peptide mix that includes HLA-A restricted, HLA-B restricted, and HLA-DR restricted peptides, wherein the HLA-A matched peptides are selected from the peptides of Tables 201-207, the HLA-B peptides are selected from the peptides of Tables 208-214, and the HLA-DR peptides are selected from the peptides of Tables 215-220. For example, if the donor cell source has an HLA profile that is HLA-A*01/*02:01; HLA-B*15:01/*18; and HLA-DRB1*0101/*0301, then the LMP1 peptides used to prime and expand the LMP1 specific T-cell subpopulation are restricted to the specific HLA profile, and may include the peptides identified in Table 201 (Seq. ID. Nos. 2009-2013) for HLA-A*01; Table 202 (Seq. ID. Nos. 2014-2018) for HLA-A*02:01; Table 210 (Seq. ID. Nos. 2054-2058) for HLA-B*15:01; Table 211 (Seq. ID. Nos. 2059-2063) for HLA-B*18; Table 215 (Seq. ID. Nos. 2079-2083) for HLA-DRB1*0101; and Table 216 (Seq. ID. Nos. 2084-2088) for HLA-DRB1*0301. In some embodiments, the mastermix of peptides includes both an overlapping peptide library and specifically selected HLA-restricted peptides generated by determining the HLA profile of the donor source.

[0294] In some embodiments, the LMP1 HLA-restricted epitopes are specific to at least both of the donor's HLA-A alleles, at least both of the donor's HLA-B alleles, and at least both of the donor's HLA-DR alleles. In some embodiments, the LMP1 HLA-A alleles are selected from a group comprising HLA-A*01, HLA-A*02:01, HLA-A*03, HLA-A*11:01, HLA-A*24:02, HLA-A*26, or HLA-A*68:01, and the corresponding LMP1 HLA-restricted peptides are selected for: HLA-A*01 from Table 201; HLA-A*02:01 from Table 202; HLA-A*03 from Table 203; HLA-A*11:01 from Table 204; HLA-A*24:02 from Table 205; HLA-A*26 from Table 206; or HLA-A*68:01 from Table 207; or any combination thereof. In some embodiments, the LMP1 HLA-B alleles are selected from a group comprising HLA-B*07:02, HLA-B*08, HLA-B*15:01 (B62), HLA-B*18, HLA-B*27:05, HLA-B*35:01, or HLA-B*58:02, and the corresponding LMP1 HLA-restricted peptides are selected for: HLA-B*07:02 from Table 208; HLA-B*08 from Table 209; HLA-B*15:01 (B62) from Table 210; HLA-B*18 from Table 211; HLA-B*27:05 from Table 212; HLA-B*35:01 from Table 213, or HLA-B*58:02 from Table 214; or any combination thereof. In some embodiments, the LMP1 HLA-DR alleles are selected from a group comprising HLA-DRB1*0101, HLA-DRB1*0301 (DR17), HLA-DRB1*0401 (DR4Dw4), HLA-DRB1*0701, HLA-DRB1*1101, or HLA-DRB1*1501 (DR2b) and the corresponding LMP1 HLA-restricted peptides are selected for: HLA-DRB1*0101 from Table 215; HLA-DRB1*0301 (DR17) from Table 216; HLA-DRB1*0401 (DR4Dw4) from Table 217; HLA-DRB1*0701 from Table 218; HLA-DRB1*1101 from Table 219; or HLA-DRB1*1501 (DR2b) from Table 220; or any combination thereof.

TABLE 201
EBV Strain B95-8 LMP1 HLA-A*01 Epitope Peptides

| SEQ ID NO. | Sequence |
|---|---|
| 2009 | LLALLFWLY |
| 2010 | WTGGALLVLY |
| 2011 | LLLLALLFWLY |
| 2012 | MSDWTGGALLV |
| 2013 | DWTGGALLVLY |

TABLE 202
EBV Strain B95-8 LMP1 HLA-A*02:01 Epitope Peptides

| SEQ ID NO. | Sequence |
|---|---|
| 2014 | ALLLLLLAL |
| 2015 | LLLLLLALL |
| 2016 | YLLEMLWRL |
| 2017 | GLALLLLLL |
| 2018 | LLLALLFWL |

TABLE 203
EBV Strain B95-8 LMP1 HLA-A*03 Epitope Peptides

| SEQ ID NO. | Sequence |
|---|---|
| 2019 | ALFLGIVLF |
| 2020 | QLLAFFLAF |
| 2021 | LLLLLALLF |
| 2022 | MLWRLGATI |
| 2023 | QLILEVENK |

TABLE 204
EBV Strain B95-8 LMP1 HLA-A*11:01 Epitope Peptides

| SEQ ID NO. | Sequence |
|---|---|
| 2024 | SSLGLALLL |
| 2025 | IILIIFIFR |
| 2026 | SSSLGLALLL |
| 2027 | IIILIIFIFR |
| 2028 | ESDSNSNEGR |

TABLE 205
EBV Strain B95-8 LMP1 HLA-A*24:02 Epitope Peptides

| SEQ ID NO. | Sequence |
|---|---|
| 2029 | LYSFALMLI |
| 2030 | FFLDLILLI |
| 2031 | IFIFRRDLL |
| 2032 | IYLLEMLWRL |
| 2033 | LYLQQNWWTL |

TABLE 206
EBV Strain B95-8 LMP1 HLA-A*26 Epitope Peptides

| SEQ ID NO. | Sequence |
|---|---|
| 2034 | DLILLIIAL |
| 2035 | ATIWQLLAF |
| 2036 | LIIIILIIF |
| 2037 | EVENKGGDQ |
| 2038 | LVDLLWLLLF |

TABLE 207
EBV Strain B95-8 LMP1 HLA-A*68:01 Epitope Peptides

| SEQ ID NO. | Sequence |
|---|---|
| 2039 | IIIILIIFIFR |
| 2040 | IILIIFIFR |
| 2041 | IIILIIFIFR |
| 2042 | ILIIFIFRR |
| 2043 | DLERGPPGPR |

TABLE 208
EBV Strain B95-8 LMP1 HLA-B*07:02 Epitope Peptides

| SEQ ID NO. | Sequence |
|---|---|
| 2044 | DPHLPTLLL |
| 2045 | PPLSSSLGL |
| 2046 | GPPLCSQNL |
| 2047 | GPPLSSSLGL |
| 2048 | CPLGALCILL |

TABLE 209
EBV Strain B95-8 LMP1 HLA-B*08 Epitope Peptides

| SEQ ID NO. | Sequence |
|---|---|
| 2049 | FIFRRDLL |
| 2050 | SNEGRHHLL |
| 2051 | SLGLALLLL |
| 2052 | ILLLMITLL |
| 2053 | DLILLIIAL |

TABLE 210
EBV Strain B95-8 LMP1 HLA-B*15:01 (B62) Epitope
Peptides

| SEQ ID NO. | Sequence |
|---|---|
| 2054 | ALFLGIVLF |
| 2055 | CLLVLGIWIY |
| 2056 | LLLALLFWLY |
| 2057 | MLIIIILIIF |
| 2058 | DLILLIIALY |

TABLE 211
EBV Strain B95-8 LMP1 HLA-B*18 Epitope Peptides

| SEQ ID NO. | Sequence |
|---|---|
| 2059 | DEHHHDDSL |
| 2060 | DLILLIIAL |
| 2061 | NEGRHHLL |
| 2062 | DLLWLLLF |
| 2063 | EEVENKGG |

TABLE 212
EBV Strain B95-8 LMP1 HLA-B*27:05
Epitope Peptides

| SEQ ID NO. | Sequence |
|---|---|
| 2064 | WRLGATIWQL |
| 2065 | PRGPPLSSSL |
| 2066 | RRPPRGPPL |
| 2067 | ERGPPGPRR |
| 2068 | FRRDLLCPL |

TABLE 213
EBV Strain B95-8 LMP1 HLA-B*35:01
Epitope Peptides

| SEQ ID NO. | Sequence |
|---|---|
| 2069 | PPLSSSLGL |
| 2070 | DPHLPTLLL |
| 2071 | GPPLCSQNL |
| 2072 | CPLGALCILL |
| 2073 | DPHGPVQLSY |

TABLE 214
EBV Strain B95-8 LMP1 HLA-B*58:02
Epitope Peptides

| SEQ ID NO. | Sequence |
|---|---|
| 2074 | SSLGLALLL |
| 2075 | ITLLLIALW |
| 2076 | LSSSLGLAL |
| 2077 | SSSLGLALLL |
| 2078 | NSNEGRHHLL |

TABLE 215
EBV Strain B95-8 LMP1 HLA-DRB1*0101
Epitope Peptides

| SEQ ID NO. | Sequence |
|---|---|
| 2079 | LALLLLLLALLFWLY |
| 2080 | RDLLCPLGALCILLL |
| 2081 | LIALWNLHGQALFLG |
| 2082 | GATIWQLLAFFLAFF |
| 2083 | LGIVLFIFGCLLVLG |

TABLE 216
EBV Strain B95-8 LMP1 HLA-DRB1*0301
(DR17) Epitope Peptides

| SEQ ID NO. | Sequence |
|---|---|
| 2084 | WWTLLVDLLWLLLFL |
| 2085 | IFIFRRDLLCPLGAL |
| 2086 | IILIIFIFRRDLLCP |
| 2087 | ILIIFIFRRDLLCPL |
| 2088 | GLALLLLLLALLFWL |

TABLE 217
EBV Strain B95-8 LMP1 HLA-DRB1*0401
(DR4Dw4) Epitope Peptides

| SEQ ID NO. | Sequence |
|---|---|
| 2089 | LFWLYIVMSDWTGGA |
| 2090 | LYIVMSDWTGGALLV |
| 2091 | GGALLVLYSFALMLI |
| 2092 | IILIIFIFRRDLLCP |
| 2093 | ILIIFIFRRDLLCPL |

TABLE 218
EBV Strain B95-8 LMP1 HLA-DRB1*0701
Epitope Peptides

| SEQ ID NO. | Sequence |
|---|---|
| 2094 | HDPLPHSPSDSAGND |
| 2095 | GGALLVLYSFALMLI |
| 2096 | LVLYSFALMLIIIIL |
| 2097 | LCILLLMITLLLIAL |
| 2098 | LWRLGATIWQLLAFF |

TABLE 219
EBV Strain B95-8 LMP1 HLA-DRB1*1101
Epitope Peptides

| SEQ ID NO. | Sequence |
|---|---|
| 2099 | IYLLEMLWRLGATIW |
| 2100 | FWLYIVMSDWTGGAL |
| 2101 | ATIWQLLAFFLAFFL |
| 2102 | IILIIFIFRRDLLCP |
| 2103 | QNWWTLLVDLLWLLL |

TABLE 220
EBV Strain B95-8 LMP1 HLA-DRB1*1501
(DR2b) Epitope Peptides

| SEQ ID NO. | Sequence |
|---|---|
| 2104 | WQLLAFFLAFFLDLI |
| 2105 | LLWLLLFLAILIWMY |
| 2106 | LLALLFWLYIVMSDW |
| 2107 | LLVLYSFALMLIIII |
| 2108 | GIVLFIFGCLLVLGI |

[0295] Epstein-Barr Virus (EBV) Strain B95-8 LMP2 Antigenic Peptides

[0296] In some embodiments, the TVM or VM composition includes Epstein-Barr Virus (EBV) Strain B95-8 LMP2 specific T-cells. LMP2 specific T-cells can be generated as described below using one or more antigenic peptides to LMP2. In some embodiments, the LMP2 specific T-cells are generated using one or more antigenic peptides to LMP2, or a modified or heteroclitic peptide derived from a LMP2 peptide. In some embodiments, LMP2 specific T-cells are generated using a LMP2 antigen library comprising a pool of peptides (for example 15mers) containing amino acid overlap (for example 11 amino acids of overlap) between each sequence formed by scanning the protein amino acid sequence SEQ. ID. No. 2109 (UniProt KB—P13285) for EBV Strain B95-8 LMP2:

MGSLEMVPMGAGPPSPGGDPDGYDGGNNSQYPSASGSSGNTPTPPNDEER
ESNEEPPPPYEDPYWGNGDRHSDYQPLGTQDQSLYLGLQHDGNDGLPPPP
YSPRDDSSQHIYEEAGRGSMNPVCLPVIVAPYLFWLAAIAASCETASVST
VVTATGLALSLLLLAAVASSYAAAQRKLLTPVTVLTAVVTFFAICLTWRI
EDPPENSLLFALLAAAGGLQGIYVLVMLVLLILAYRRRWRRLTVCGGIMF
LACVLVLIVDAVLQLSPLLGAVTVVSMTLLLLAFVLWLSSPGGLGTLGAA
LLTLAAALALLASLILGTLNLTTMELLMLLWTLVVLLICSSCSSCPLSKI
LLARLFLYALALLLLASALIAGGSILQTNEKSLSSTEFIPNLFCMLLLIV
AGILFILAILTEWGSGNRTYGPVFMCLGGLLTMVAGAVWLTVMSNTLLSA
WILTAGFLIFLIGFALFGVIRCCRYCCYYCLTLESEERPPTPYRNTV.

[0297] In some embodiments, the LMP2 specific T-cells are generated using one or more antigenic peptides to LMP2, or a modified or heteroclitic peptide derived from a LMP2 peptide. In some embodiments, the LMP2 specific T-cells are generated with peptides that recognize class I MHC molecules. In some embodiments, the LMP2 specific T-cells are generated with peptides that recognize class II MHC molecules. In some embodiments, the LMP2 specific T-cells are generated with peptides that recognize both class I and class II MHC molecules.

[0298] In some embodiments, the LMP2 peptides used to prime and expand a T-cell subpopulation includes specifically selected HLA-restricted peptides generated by determining the HLA profile of the donor source, and including peptides derived from LMP2 that best match the donor's HLA. In some embodiments, the LMP2 peptides used to prime and expand a T-cell subpopulation are derived from HLA-restricted peptides selected from at least one or more of an HLA-A restricted peptide, HLA-B restricted peptide, or HLA-DR restricted peptide. Suitable methods for generating HLA-restricted peptides from an antigen have been described in, for example, Rammensee, HG., Bachmann, J., Emmerich, N. et al., SYFPEITHI: database for MHC ligands and peptide motifs. Immunogenetics (1999) 50: 213. https://doi.org/10.1007/s002510050595.

As provided herein, the HLA profile of a donor cell source can be determined, and T-cell subpopulations targeting LMP2 derived, wherein the T-cell subpopulation is primed and expanded using a group of peptides that are HLA-restricted to the donor's HLA profile. In certain embodiments, the T-cell subpopulation is exposed to a peptide mix that includes one or more HLA-A restricted, HLA-B restricted, and HLA-DR restricted peptides. In certain embodiments, the T-cell subpopulation is exposed to a peptide mix that includes HLA-A restricted, HLA-B restricted, and HLA-DR restricted peptides, wherein the HLA-A matched peptides are selected from the peptides of Tables 221-227, the HLA-B peptides are selected from the peptides of Tables 228-234, and the HLA-DR peptides are selected from the peptides of Tables 235-240. For example, if the donor cell source has an HLA profile that is HLA-A*01/*02:01; HLA-B*15:01/*18; and HLA-DRB1*0101/*0301, then the LMP2 peptides used to prime and expand the LMP2 specific T-cell subpopulation are restricted to the specific HLA profile, and may include the peptides identified in Table 221 (Seq. ID. Nos. 2009-2013) for HLA-A*01; Table 222 (Seq. ID. Nos. 2115-2119) for HLA-A*02:01; Table 230 (Seq. ID. Nos. 2155-2159) for HLA-B*15:01; Table 231 (Seq. ID. Nos. 2160-2164) for HLA-B*18; Table 235 (Seq. ID. Nos. 2180-2184) for HLA-DRB1*0101; and Table 236 (Seq. ID. Nos. 2185-2189) for HLA-DRB1*0301. In some embodiments, the mastermix of peptides includes both an overlapping peptide library and specifically selected HLA-restricted peptides generated by determining the HLA profile of the donor source.

[0299] In some embodiments, the LMP2 HLA-restricted epitopes are specific to at least both of the donor's HLA-A alleles, at least both of the donor's HLA-B alleles, and at least both of the donor's HLA-DR alleles. In some embodiments, the LMP2 HLA-A alleles are selected from a group comprising HLA-A*01, HLA-A*02:01, HLA-A*03, HLA-A*11:01, HLA-A*24:02, HLA-A*26, or HLA-A*68:01, and the corresponding LMP2 HLA-restricted peptides are selected for: HLA-A*01 from Table 221; HLA-A*02:01 from Table 222; HLA-A*03 from Table 223; HLA-A*11:01 from Table 224; HLA-A*24:02 from Table 225; HLA-A*26 from Table 226; or HLA-A*68:01 from Table 227; or any combination thereof. In some embodiments, the LMP2 HLA-B alleles are selected from a group comprising HLA-B*07:02, HLA-B*08, HLA-B*15:01 (B62), HLA-B*18, HLA-B*27:05, HLA-B*35:01, or HLA-B*58:02, and the corresponding LMP2 HLA-restricted peptides are selected for: HLA-B*07:02 from Table 228; HLA-B*08 from Table 229; HLA-B*15:01 (B62) from Table 230; HLA-B*18 from Table 231; HLA-B*27:05 from Table 232; HLA-B*35:01 from Table 233, or HLA-B*58:02 from Table 234; or any combination thereof. In some embodiments, the LMP2 HLA-DR alleles are selected from a group comprising HLA-DRB1*0101, HLA-DRB1*0301 (DR17), HLA-DRB1*0401 (DR4Dw4), HLA-DRB1*0701, HLA-DRB1*1101, or HLA-DRB1*1501 (DR2b) and the corresponding LMP2 HLA-restricted peptides are selected for: HLA-DRB1*0101 from Table 235; HLA-DRB1*0301 (DR17) from Table 236; HLA-DRB1*0401 (DR4Dw4) from Table 237; HLA-DRB1*0701 from Table 238; HLA-DRB1*1101 from Table 239; or HLA-DRB1*1501 (DR2b) from Table 240; or any combination thereof.

TABLE 221
EBV Strain B95-8 LMP2 HLA-A*01
Epitope Peptides

| SEQ ID NO. | Sequence |
|---|---|
| 2110 | RDDSSQHIY |
| 2111 | ESEERPPTPY |
| 2112 | GYDGGNNSQY |
| 2113 | GNDGLPPPPY |
| 2114 | LTEWGSGNRTY |

TABLE 222
EBV Strain B95-8 LMP2 HLA-A*02:01
Epitope Peptides

| SEQ ID NO. | Sequence |
|---|---|
| 2115 | LLLAFVLWL |
| 2116 | FLLMLLWTL |
| 2117 | LLASLILGTL |
| 2118 | LLARLFLYAL |
| 2119 | FLIGFALFGV |

TABLE 223
EBV Strain B95-8 LMP2 HLA-A*03
Epitope Peptides

| SEQ ID NO. | Sequence |
|---|---|
| 2120 | LLAAVASSY |
| 2121 | ALIAGGSIL |
| 2122 | SLLLLAAVA |
| 2123 | LLLAAVASSY |
| 2124 | QLSPLLGAVT |

TABLE 224
EBV Strain B95-8 LMP2 HLA-A*11:01
Epitope Peptides

| SEQ ID NO. | Sequence |
|---|---|
| 2125 | SSYAAAQRK |
| 2126 | GSILQTNFK |
| 2127 | SSCSSCPLSK |
| 2128 | ASSYAAAQRK |
| 2129 | AVLQLSPLLG |

TABLE 225
EBV Strain B95-8 LMP2 HLA-A*24:02
Epitope Peptides

| SEQ ID NO. | Sequence |
|---|---|
| 2130 | TYGPVFMCL |
| 2131 | PYLFWLAAI |
| 2132 | SYAAAQRKLL |
| 2133 | IYVLVMLVLL |
| 2134 | MFLACVLVLI |

TABLE 226
EBV Strain B95-8 LMP2 HLA-A*26
Epitope Peptides

| SEQ ID NO. | Sequence |
|---|---|
| 2135 | PVFMCLGGL |
| 2136 | DAVLQLSPL |
| 2137 | TVVSMTLLLL |
| 2138 | TVVTATGLAL |
| 2139 | VTVLTAVVTF |

TABLE 227
EBV Strain B95-8 LMP2 HLA-A*68:01
Epitope Peptides

| SEQ ID NO. | Sequence |
|---|---|
| 2140 | AVASSYAAAQR |
| 2141 | VTFFAICLTWR |
| 2142 | LVLLILAYR |
| 2143 | PLSKILLAR |
| 2144 | VASSYAAAQR |

TABLE 228
EBV Strain B95-8 LMP2 HLA-B*07:02
Epitope Peptides

| SEQ ID NO. | Sequence |
|---|---|
| 2145 | LPVIVAPYL |
| 2146 | APYLFWLAA |
| 2147 | IPNLFCMLLL |
| 2148 | QPLGTQDQSL |
| 2149 | SPGGLGTLGA |

TABLE 229
EBV Strain B95-8 LMP2 HLA-B*08
Epitope Peptides

| SEQ ID NO. | Sequence |
|---|---|
| 2150 | CPLSKILL |
| 2151 | ILLARLFL |
| 2152 | AAAQRKLL |
| 2153 | AYRRRWRRL |
| 2154 | LARLFLYAL |

TABLE 230
EBV Strain B95-8 LMP2 HLA-B*15:01
(B62) Epitope Peptides

| SEQ ID NO. | Sequence |
|---|---|
| 2155 | MLVLLILAY |
| 2156 | CLPVIVAPY |
| 2157 | LLAAVASSY |
| 2158 | LLLAAVASSY |
| 2159 | RLTVCGGIMF |

TABLE 231
EBV Strain B95-8 LMP2 HLA-B*18
Epitope Peptides

| SEQ ID NO. | Sequence |
|---|---|
| 2160 | SEERPPTPY |
| 2161 | IEDPPFNSL |
| 2162 | EERPPTPY |
| 2163 | TEFIPNLF |
| 2164 | NEEPPPPY |

TABLE 232
EBV Strain B95-8 LMP2 HLA-B*27:05
Epitope Peptides

| SEQ ID NO. | Sequence |
|---|---|
| 2165 | ARLFLYALAL |
| 2166 | GRGSMNPVCL |
| 2167 | RRLTVCGGIM |
| 2168 | GGLQGIYVL |
| 2169 | CRYCCYYCL |

TABLE 233
EBV Strain B95-8 LMP2 HLA-B*35:01
Epitope Peptides

| SEQ ID NO. | Sequence |
|---|---|
| 2170 | LPVIVAPYL |
| 2171 | SPGGDPDGY |
| 2172 | QPLGTQDQSL |
| 2173 | PPFNSLLFAL |
| 2174 | GPVFMCLGGL |

TABLE 234
EBV Strain B95-8 LMP2 HLA-B*58:02
Epitope Peptides

| SEQ ID NO. | Sequence |
|---|---|
| 2175 | KSLSSTEFI |
| 2176 | SSCPLSKIL |
| 2177 | LSKILLARLF |
| 2178 | SSYAAAQRKL |
| 2179 | LSSPGGLGTL |

TABLE 235
EBV Strain B95-8 LMP2 HLA-DRB1*0101
Epitope Peptides

| SEQ ID NO. | Sequence |
|---|---|
| 2180 | QTNFKSLSSTEFIPN |
| 2181 | ALSLLLLAAVASSYA |
| 2182 | PGGLGTLGAALLTLA |
| 2183 | CMLLLIVAGILFILA |
| 2184 | AGFLIFLIGFALFGV |

TABLE 236
EBV Strain B95-8 LMP2 HLA-DRB1*0301
(DR17) Epitope Peptides

| SEQ ID NO. | Sequence |
|---|---|
| 2185 | YLGLQHDGNDGLPPP |
| 2186 | VLVLIVDAVLQLSPL |
| 2187 | AVWLTVMSNTLLSAW |
| 2188 | YQPLGTQDQSLYLGL |
| 2189 | VLVMLVLLILAYRRR |

TABLE 237
EBV Strain B95-8 LMP2 HLA-DRB1*0401
(DR4Dw4) Epitope Peptides

| SEQ ID NO. | Sequence |
|---|---|
| 2190 | HSDYQPLGTQDQSLY |
| 2191 | QSLYLGLQHDGNDGL |
| 2192 | QHIYEEAGRGSMNPV |
| 2193 | ASSYAAAQRKLLTPV |
| 2194 | GAVWLTVMSNTLLSA |

TABLE 238
EBV Strain B95-8 LMP2 HLA-DRB1*0701
Epitope Peptides

| SEQ ID NO. | Sequence |
|---|---|
| 2195 | ASCFTASVSTVVTAT |
| 2196 | ACVLVLIVDAVLQLS |
| 2197 | VTFFAICLTWRIEDP |
| 2198 | GAVWLTVMSNTLLSA |
| 2199 | LSAWILTAGFLIFLI |

TABLE 239
EBV Strain B95-8 LMP2 HLA-DRB1*1101
Epitope Peptides

| SEQ ID NO. | Sequence |
|---|---|
| 2200 | QSLYLGLQHDGNDGL |
| 2201 | LTEWGSGNRTYGPVF |
| 2202 | PNLFCMLLLIVAGIL |
| 2203 | NRTYGPVFMCLGGLL |
| 2204 | VTVLTAVVTFFAICL |

TABLE 240
EBV Strain B95-8 LMP2 HLA-DRB1*1501
(DR2b) Epitope Peptides

| SEQ ID NO. | Sequence |
|---|---|
| 2205 | LTAVVTFFAICLTWR |
| 2206 | FLLMLLWTLVVLLIC |
| 2207 | LIFLIGFALFGVIRC |
| 2208 | LAILTEWGSGNRTYG |
| 2209 | LIGFALFGVIRCCRY |

[0300] Epstein-Barr Virus (EBV) Strain B95-8 EBNA1 Antigenic Peptides

[0301] In some embodiments, the TVM or VM composition includes Epstein-Barr Virus (EBV) Strain B95-8 EBNA1 specific T-cells. EBNA1 specific T-cells can be generated as described below using one or more antigenic peptides to EBNA1. In some embodiments, the EBNA1 specific T-cells are generated using one or more antigenic peptides to EBNA1, or a modified or heteroclitic peptide derived from a EBNA1 peptide. In some embodiments, EBNA1 specific T-cells are generated using a EBNA1 antigen library comprising a pool of peptides (for example 15mers) containing amino acid overlap (for example 11 amino acids of overlap) between each sequence formed by scanning the protein amino acid sequence SEQ. ID. No. 2210 (UniProt KB—P03211) for EBV Strain B95-8 EBNA1:

MSDEGPGTGPGNGLGEKGDTSGPEGSGGSGPQRRGGDNHGRGRGRGRGRG
GGRPGAPGGSGSGPRHRDGVRRPQKRPSCIGCKGTHGGTGAGAGAGGAGA
GGAGAGGGAGAGGGAGGAGGAGGAGAGGGAGAGGGAGGAGGAGAGGGAGA
GGGAGGAGAGGGAGGAGGAGAGGGAGAGGGAGGAGAGGGAGGAGGAGAGG
GAGAGGAGGAGGAGAGGAGAGGGAGGAGGAGAGGAGAGGAGAGGAGAGGA
GGAGAGGAGGAGAGGAGGAGAGGGAGGAGAGGGAGGAGAGGAGGAGAGGA
GGAGAGGAGGAGAGGGAGAGGAGAGGGGRGRGGSGGRGRGGSGGRGRGGS
GGRRGRGRERARGGSRERARGRGRGRGEKRPRSPSSQSSSSGSPPRRPPP
GRRPFFHPVGEADYFEYHQEGGPDGEPDVPPGAIEQGPADDPGEGPSTGP
RGQGDGGRRKKGGWFGKHRGQGGSNPKFENIAEGLRALLARSHVERTTDE
GTWVAGVFVYGGSKTSLYNLRRGTALAIPQCRLTPLSRLPFGMAPGPGPQ
PGPLRESIVCYFMVFLQTHIFAEVLKDAIKDLVMTKPAPTCNIRVTVCSF
DDGVDLPPWFPPMVEGAAAEGDDGDDGDEGGDGDEGEEGQE.

[0302] In some embodiments, the EBNA1 specific T-cells are generated using one or more antigenic peptides to EBNA1, or a modified or heteroclitic peptide derived from a EBNA1 peptide. In some embodiments, the EBNA1 specific T-cells are generated with peptides that recognize class I MHC molecules. In some embodiments, the EBNA1 specific T-cells are generated with peptides that recognize class II MHC molecules. In some embodiments, the EBNA1 specific T-cells are generated with peptides that recognize both class I and class II MHC molecules.

[0303] In some embodiments, the EBNA1 peptides used to prime and expand a T-cell subpopulation includes specifically selected HLA-restricted peptides generated by determining the HLA profile of the donor source, and including peptides derived from EBNA1 that best match the donor's HLA. In some embodiments, the EBNA1 peptides used to prime and expand a T-cell subpopulation are derived from HLA-restricted peptides selected from at least one or more of an HLA-A restricted peptide, HLA-B restricted peptide, or HLA-DR restricted peptide. Suitable methods for generating HLA-restricted peptides from an antigen have been described in, for example, Rammensee, HG., Bachmann, J., Emmerich, N. et al., SYFPEITHI: database for MHC ligands and peptide motifs. Immunogenetics (1999) 50: 213. https://doi.org/10.1007/s002510050595.

As provided herein, the HLA profile of a donor cell source can be determined, and T-cell subpopulations targeting EBNA1 derived, wherein the T-cell subpopulation is primed and expanded using a group of peptides that are HLA-restricted to the donor's HLA profile. In certain embodiments, the T-cell subpopulation is exposed to a peptide mix that includes one or more HLA-A restricted, HLA-B restricted, and HLA-DR restricted peptides. In certain embodiments, the T-cell subpopulation is exposed to a peptide mix that includes HLA-A restricted, HLA-B restricted, and HLA-DR restricted peptides, wherein the HLA-A matched peptides are selected from the peptides of Tables 241-247, the HLA-B peptides are selected from the peptides of Tables 248-254, and the HLA-DR peptides are selected from the peptides of Tables 255-260. For example, if the donor cell source has an HLA profile that is HLA-A*01/*02:01; HLA-B*15:01/*18; and HLA-DRB1*0101/*0301, then the EBNA1 peptides used to prime and expand the EBNA1 specific T-cell subpopulation are restricted to the specific HLA profile, and may include the peptides identified in Table 241 (Seq. ID. Nos. 2211-2215) for HLA-A*01; Table 242 (Seq. ID. Nos. 2216-2220) for HLA-A*02:01; Table 250 (Seq. ID. Nos. 2256-2260) for HLA-B*15:01; Table 251 (Seq. ID. Nos. 2261-2265) for HLA-B*18; Table 255 (Seq. ID. Nos. 2281-2285) for HLA-DRB1*0101; and Table 256 (Seq. ID. Nos. 2286-2290) for HLA-DRB1*0301. In some embodiments, the mastermix of peptides includes both an overlapping peptide library and specifically selected HLA-restricted peptides generated by determining the HLA profile of the donor source.

[0304] In some embodiments, the EBNA1 HLA-restricted epitopes are specific to at least both of the donor's HLA-A alleles, at least both of the donor's HLA-B alleles, and at least both of the donor's HLA-DR alleles. In some embodiments, the EBNA1 HLA-A alleles are selected from a group comprising HLA-A*01, HLA-A*02:01, HLA-A*03, HLA-A*11:01, HLA-A*24:02, HLA-A*26, or HLA-A*68:01, and the corresponding EBNA1 HLA-restricted peptides are selected for: HLA-A*01 from Table 241; HLA-A*02:01 from Table 242; HLA-A*03 from Table 243; HLA-A*11:01 from Table 244; HLA-A*24:02 from Table 245; HLA-A*26 from Table 246; or HLA-A*68:01 from Table 247; or any combination thereof. In some embodiments, the EBNA1 HLA-B alleles are selected from a group comprising HLA-B*07:02, HLA-B*08, HLA-B*15:01 (B62), HLA-B*18, HLA-B*27:05, HLA-B*35:01, or HLA-B*58:02, and the corresponding EBNA1 HLA-restricted peptides are selected for: HLA-B*07:02 from Table 248; HLA-B*08 from Table 249; HLA-B*15:01 (B62) from Table 250; HLA-B*18 from Table 251; HLA-B*27:05 from Table 252; HLA-B*35:01 from Table 253, or HLA-B*58:02 from Table 254; or any combination thereof. In some embodiments, the EBNA1 HLA-DR alleles are selected from a group comprising HLA-DRB1*0101, HLA-DRB1*0301 (DR17), HLA-DRB1*0401 (DR4Dw4), HLA-DRB1*0701, HLA-DRB1*1101, or HLA-DRB1*1501 (DR2b) and the corresponding EBNA1 HLA-restricted peptides are selected for: HLA-DRB1*0101 from Table 255; HLA-DRB1*0301 (DR17) from Table 256; HLA-DRB1*0401 (DR4Dw4) from Table 257; HLA-DRB1*0701 from Table 258; HLA-DRB1*1101 from Table 259; or HLA-DRB1*1501 (DR2b) from Table 260; or any combination thereof.

TABLE 241
EBV Strain B95-8 EBNA1 HLA-A*01 Epitope Peptides

| SEQ ID NO. | Sequence |
|---|---|
| 2211 | VGEADYFEY |
| 2212 | TTDEGTWVA |
| 2213 | TWVAGVFVY |
| 2214 | GTWVAGVFVY |
| 2215 | FVYGGSKTSLY |

TABLE 242
EBV Strain B95-8 EBNA1 HLA-A*02:01 Epitope Peptides

| SEQ ID NO. | Sequence |
|---|---|
| 2216 | NIAEGLRAL |
| 2217 | ALAIPQCRL |
| 2218 | VLKDAIKDL |
| 2219 | FLQTHIFAEV |
| 2220 | AIPQCRLTPL |

TABLE 243
EBV Strain B95-8 EBNA1 HLA-A*03 Epitope Peptides

| SEQ ID NO. | Sequence |
|---|---|
| 2221 | AIKDLVMTK |
| 2222 | GVFVYGGSK |
| 2223 | ALLARSHVER |
| 2224 | RLTPLSRLPF |
| 2225 | GLRALLARSH |

TABLE 244
EBV Strain B95-8 EBNA1 HLA-A*11:01 Epitope Peptides

| SEQ ID NO. | Sequence |
|---|---|
| 2226 | GVFVYGGSK |
| 2227 | GSGSGPRHR |
| 2228 | QTHIFAEVLK |
| 2229 | ALLARSHVER |
| 2230 | GSKTSLYNLR |

TABLE 245
EBV Strain B95-8 EBNA1 HLA-A*24:02 Epitope Peptides

| SEQ ID NO. | Sequence |
|---|---|
| 2231 | VYGGSKTSL |
| 2232 | LYNLRRGTAL |
| 2233 | KFENIAEGL |
| 2234 | IFAEVLKDAI |
| 2235 | YFMVFLQTHI |

TABLE 246
EBV Strain B95-8 EBNA1 HLA-A*26 Epitope Peptides

| SEQ ID NO. | Sequence |
|---|---|
| 2236 | MVFLQTHIF |
| 2237 | DGVDLPPWF |
| 2238 | EVLKDAIKDL |
| 2239 | ENIAEGLRAL |
| 2240 | DVPPGAIEQG |

TABLE 247
EBV Strain B95-8 EBNA1 HLA-A*68:01 Epitope Peptides

| SEQ ID NO. | Sequence |
|---|---|
| 2241 | RALLARSHVER |
| 2242 | GTALAIPQCR |
| 2243 | QTHIFAEVLK |
| 2244 | DAIKDLVMTK |
| 2245 | MTKPAPTCNIR |

TABLE 248
EBV Strain B95-8 EBNA1 HLA-B*07:02 Epitope Peptides

| SEQ ID NO. | Sequence |
|---|---|
| 2246 | IPQCRLTPL |
| 2247 | GPGPQPGPL |
| 2248 | EPDVPPGAI |
| 2249 | GPGTGPGNGL |
| 2250 | RPPPGRRPFF |

TABLE 249
EBV Strain B95-8 EBNA1 HLA-B*08 Epitope Peptides

| SEQ ID NO. | Sequence |
|---|---|
| 2251 | NLRRGTAL |
| 2252 | GPRHRDGV |
| 2253 | VLKDAIKDL |
| 2254 | IPQCRLTPL |
| 2255 | GRRKKGGWF |

TABLE 250
EBV Strain B95-8 EBNA1 HLA-B*15:01 (B62)
Epitope Peptides

| SEQ ID NO. | Sequence |
|---|---|
| 2256 | PLRESIVCY |
| 2257 | RLTPLSRLPF |
| 2258 | GQGGSNPKF |
| 2259 | PVGEADYFEY |
| 2260 | MVFLQTHIF |

TABLE 251
EBV Strain B95-8 EBNA1 HLA-B*18 Epitope Peptides

| SEQ ID NO. | Sequence |
|---|---|
| 2261 | RESIVCYF |
| 2262 | GEADYFEY |
| 2263 | FENIAEGL |
| 2264 | AEGLRALL |
| 2265 | DGVDLPPWF |

TABLE 252
EBV Strain B95-8 EBNA1 HLA-B*27:05 Epitope Peptides

| SEQ ID NO. | Sequence |
|---|---|
| 2266 | RRKKGGWFGK |
| 2267 | GRGGSGGRGR |
| 2268 | GRGGSGGRR |
| 2269 | RRGGDNHGR |
| 2270 | CRLTPLSRL |

TABLE 253
EBV Strain B95-8 EBNA1 HLA-B*35:01 Epitope Peptides

| SEQ ID NO. | Sequence |
|---|---|
| 2271 | HPVGEADYF |
| 2272 | IPQCRLTPL |
| 2273 | GPGPQPGPL |
| 2274 | GPLRESIVCY |
| 2275 | GPGTGPGNGL |

TABLE 254
EBV Strain B95-8 EBNA1 HLA-B*58:02 Epitope Peptides

| SEQ ID NO. | Sequence |
|---|---|
| 2276 | GSNPKFENI |
| 2277 | GSKTSLYNL |
| 2278 | IAEGLRALL |
| 2279 | ESIVCYFMVF |
| 2280 | MTKPAPTCNI |

TABLE 255
EBV Strain B95-8 EBNA1 HLA-DRB1*0101
Epitope Peptides

| SEQ ID NO. | Sequence |
|---|---|
| 2281 | CYFMVFLQTHIFAEV |
| 2282 | TSLYNLRRGTALAIP |
| 2283 | RLPFGMAPGPGPQPG |
| 2284 | AEGLRALLARSHVER |
| 2285 | AGVFVYGGSKTSLYN |

TABLE 256
EBV Strain B95-8 EBNA1 HLA-DRB1*0301
(DR17) Epitope Peptides

| SEQ ID NO. | Sequence |
|---|---|
| 2286 | FAEVLKDAIKDLVMT |
| 2287 | FENIAEGLRALLARS |
| 2288 | QCRLTPLSRLPFGMA |
| 2289 | RPFFHPVGEADYFEY |
| 2290 | GVFVYGGSKTSLYNL |

TABLE 257
EBV Strain B95-8 EBNA1 HLA-DRB1*0401
(DR4Dw4) Epitope Peptides

| SEQ ID NO. | Sequence |
|---|---|
| 2291 | VCYFMVFLQTHIFAE |
| 2292 | KTSLYNLRRGTALAI |
| 2293 | AGVFVYGGSKTSLYN |
| 2294 | THIFAEVLKDAIKDL |
| 2295 | FENIAEGLRALLARS |

TABLE 258
EBV Strain B95-8 EBNA1 HLA-DRB1*0701
Epitope Peptides

| SEQ ID NO. | Sequence |
|---|---|
| 2296 | VFVYGGSKTSLYNLR |
| 2297 | RPFFHPVGEADYFEY |
| 2298 | NPKFENIAEGLRALL |
| 2299 | RSHVERTTDEGTWVA |
| 2300 | CYFMVFLQTHIFAEV |

TABLE 259
EBV Strain B95-8 EBNA1 HLA-DRB1*1101
Epitope Peptides

| SEQ ID NO. | Sequence |
|---|---|
| 2301 | KTSLYNLRRGTALAI |
| 2302 | KGGWFGKHRGQGGSN |
| 2303 | THIFAEVLKDAIKDL |
| 2304 | PPWFPPMVEGAAAEG |
| 2305 | QCRLTPLSRLPFGMA |

TABLE 260
EBV Strain B95-8 EBNA1 HLA-DRB1*1501
(DR2b) Epitope Peptides

| SEQ ID NO. | Sequence |
|---|---|
| 2306 | RESIVCYFMVFLQTH |
| 2307 | ESIVCYFMVFLQTHI |
| 2308 | VAGVFVYGGSKTSLY |
| 2309 | GVDLPPWFPPMVEGA |
| 2310 | LYNLRRGTALAIPQC |

[0305] Epstein-Barr Virus (EBV) Strain B95-8 EBNA2 Antigenic Peptides

[0306] In some embodiments, the TVM or VM composition includes Epstein-Barr Virus (EBV) Strain B95-8 EBNA2 specific T-cells. EBNA2 specific T-cells can be generated as described below using one or more antigenic peptides to EBNA2. In some embodiments, the EBNA2 specific T-cells are generated using one or more antigenic peptides to EBNA2, or a modified or heteroclitic peptide derived from a EBNA2 peptide. In some embodiments, EBNA2 specific T-cells are generated using a EBNA2 antigen library comprising a pool of peptides (for example 15mers) containing amino acid overlap (for example 11 amino acids of overlap) between each sequence formed by scanning the protein amino acid sequence SEQ. ID. No. 2311 (UniProt KB—P03211) for EBV Strain B95-8 EBNA2:

MPTFYLALHGGQTYHLIVDTDSLGNPSLSVIPSNPYQEQLSDTPLIPLTI
FVGENTGVPPPLPPPPPPPPPPPPPPPPPPPPPPPPPPSPPPPPPPPPPP
QRRDAWTQEPSPLDRDPLGYDVGHGPLASAMRMLWMANYIVRQSRGDRGL
ILPQGPQTAPQARLVQPHVPPLRPTAPTILSPLSQPRLTPPQPLMMPPRP
TPPTPLPPATLTVPPRPTRPTTLPPTPLLTVLQRPTELQPTPSPPRMHLP
VLHVPDQSMHPLTHQSTPNDPDSPEPRSPTVFYNIPPMPLPPSQLPPPAA
PAQPPPGVINDQQLHHLPSGPPWWPPICDPPQPSKTQGQSRGQSRGRGRG
RGRGRGKGKSRDKQRKPGGPWRPEPNTSSPSMPELSPVLGLHQGQGAGDS
PTPGPSNAAPVCRNSHTATPNVSPIHEPESHNSPEAPILFPDDWYPPSID
PADLDESWDYIFETTESPSSDEDYVEGPSKRPRPSIQ.

[0307] In some embodiments, the EBNA2 specific T-cells are generated using one or more antigenic peptides to EBNA2, or a modified or heteroclitic peptide derived from a EBNA2 peptide. In some embodiments, the EBNA2 specific T-cells are generated with peptides that recognize class I MHC molecules. In some embodiments, the EBNA2 specific T-cells are generated with peptides that recognize class II MHC molecules. In some embodiments, the EBNA2 specific T-cells are generated with peptides that recognize both class I and class II MHC molecules.

[0308] In some embodiments, the EBNA2 peptides used to prime and expand a T-cell subpopulation includes specifically selected HLA-restricted peptides generated by determining the HLA profile of the donor source, and including peptides derived from EBNA2 that best match the donor's HLA. In some embodiments, the EBNA2 peptides used to prime and expand a T-cell subpopulation are derived from HLA-restricted peptides selected from at least one or more of an HLA-A restricted peptide, HLA-B restricted peptide, or HLA-DR restricted peptide. Suitable methods for generating HLA-restricted peptides from an antigen have been described in, for example, Rammensee, HG., Bachmann, J., Emmerich, N. et al., SYFPEITHI: database for MHC ligands and peptide motifs. Immunogenetics (1999) 50: 213. https://doi.org/10.1007/s002510050595.

As provided herein, the HLA profile of a donor cell source can be determined, and T-cell subpopulations targeting EBNA2 derived, wherein the T-cell subpopulation is primed and expanded using a group of peptides that are HLA-restricted to the donor's HLA profile. In certain embodiments, the T-cell subpopulation is exposed to a peptide mix that includes one or more HLA-A restricted, HLA-B restricted, and HLA-DR restricted peptides. In certain embodiments, the T-cell subpopulation is exposed to a peptide mix that includes HLA-A restricted, HLA-B restricted, and HLA-DR restricted peptides, wherein the HLA-A matched peptides are selected from the peptides of Tables 261-267, the HLA-B peptides are selected from the peptides of Tables 268-274, and the HLA-DR peptides are selected from the peptides of Tables 275-280. For example, if the donor cell source has an HLA profile that is HLA-A*01/*02:01; HLA-B*15:01/*18; and HLA-DRB1*0101/*0301, then the EBNA2 peptides used to prime and expand the EBNA2 specific T-cell subpopulation are restricted to the specific HLA profile, and may include the peptides identified in Table 261 (Seq. ID. Nos. 2312-2316) for HLA-A*01; Table 262 (Seq. ID. Nos. 2317-2321) for HLA-A*02:01; Table 270 (Seq. ID. Nos. 2357-2361) for HLA-B*15:01; Table 271 (Seq. ID. Nos. 2362-2366) for HLA-B*18; Table 275 (Seq. ID. Nos. 2382-2386) for HLA-DRB1*0101; and Table 276 (Seq. ID. Nos. 2387-2391) for HLA-DRB1*0301. In some embodiments, the mastermix of peptides includes both an overlapping peptide library and specifically selected HLA-restricted peptides generated by determining the HLA profile of the donor source.

[0309] In some embodiments, the EBNA2 HLA-restricted epitopes are specific to at least both of the donor's HLA-A alleles, at least both of the donor's HLA-B alleles, and at least both of the donor's HLA-DR alleles. In some embodiments, the EBNA2 HLA-A alleles are selected from a group comprising HLA-A*01, HLA-A*02:01, HLA-A*03, HLA-A*11:01, HLA-A*24:02, HLA-A*26, or HLA-A*68:01, and the corresponding EBNA2 HLA-restricted peptides are selected for: HLA-A*01 from Table 261; HLA-A*02:01 from Table 262; HLA-A*03 from Table 263; HLA-A*11:01 from Table 264; HLA-A*24:02 from Table 265; HLA-A*26 from Table 266; or HLA-A*68:01 from Table 267; or any combination thereof. In some embodiments, the EBNA2 HLA-B alleles are selected from a group comprising HLA-B*07:02, HLA-B*08, HLA-B*15:01 (B62), HLA-B*18, HLA-B*27:05, HLA-B*35:01, or HLA-B*58:02, and the corresponding EBNA2 HLA-restricted peptides are selected for: HLA-B*07:02 from Table 268; HLA-B*08 from Table 269; HLA-B*15:01 (B62) from Table 270; HLA-B*18 from Table 271; HLA-B*27:05 from Table 272; HLA-B*35:01 from Table 273, or HLA-B*58:02 from Table 274; or any combination thereof. In some embodiments, the EBNA2 HLA-DR alleles are selected from a group comprising HLA-DRB1*0101, HLA-DRB1*0301 (DR17), HLA-DRB1*0401 (DR4Dw4), HLA-DRB1*0701, HLA-DRB1*1101, or HLA-DRB1*1501 (DR2b) and the corresponding EBNA2 HLA-restricted peptides are selected for: HLA-DRB1*0101 from Table 275; HLA-DRB1*0301 (DR17) from Table 276; HLA-DRB1*0401 (DR4Dw4) from Table 277; HLA-DRB1*0701 from Table 278; HLA-DRB1*1101 from Table 279; or HLA-DRB1*1501 (DR2b) from Table 280; or any combination thereof.

TABLE 261
EBV Strain B95-8 EBNA2 HLA-A*01 Epitope Peptides

| SEQ ID NO. | Sequence |
|---|---|
| 2312 | PLDRDPLGY |
| 2313 | PADLDESWDY |
| 2314 | TTESPSSDEDY |
| 2315 | SPEPRSPTVFY |
| 2316 | PSPLDRDPLGY |

TABLE 262
EBV Strain B95-8 EBNA2 HLA-A*02:01
Epitope Peptides

| SEQ ID NO. | Sequence |
|---|---|
| 2317 | HLIVDTDSL |
| 2318 | SLGNPSLSV |
| 2319 | TLPPTPLLTV |
| 2320 | VINDQQLHHL |
| 2321 | ALHGGQTYHL |

TABLE 263
EBV Strain B95-8 EBNA2 HLA-A*03
Epitope Peptides

| SEQ ID NO. | Sequence |
|---|---|
| 2322 | RGRGRGRGK |
| 2323 | PLDRDPLGY |
| 2324 | YLALHGGQTY |
| 2325 | RLTPPQPLMIVI |
| 2326 | SVIPSNPYQE |

TABLE 264
EBV Strain B95-8 EBNA2 HLA-A*11:01
Epitope Peptides

| SEQ ID NO. | Sequence |
|---|---|
| 2327 | PSNAAPVCR |
| 2328 | WTQEPSPLDR |
| 2329 | PTPLLTVLQR |
| 2330 | LVQPHVPPLR |
| 2331 | MLWMANYIVR |

TABLE 265
EBV Strain B95-8 EBNA2 HLA-A*24:02
Epitope Peptides

| SEQ ID NO. | Sequence |
|---|---|
| 2332 | GYDVGHGPL |
| 2333 | FYNIPPMPL |
| 2334 | NSPEAPILF |
| 2335 | TTLPPTPLL |
| 2336 | TVLQRPILL |

TABLE 266
EBV Strain B95-8 EBNA2 HLA-A*26
Epitope Peptides

| SEQ ID NO. | Sequence |
|---|---|
| 2337 | LVQPHVPPL |
| 2338 | ETTESPSSD |
| 2339 | DTPLIPLTIF |
| 2340 | DTDSLGNPSL |
| 2341 | DVGHGPLASA |

TABLE 267
EBV Strain B95-8 EBNA2 HLA-A*68:01
Epitope Peptides

| SEQ ID NO. | Sequence |
|---|---|
| 2342 | PTILSPLSQPR |
| 2343 | PATLTVPPR |
| 2344 | PTPLLTVLQR |
| 2345 | MLWMANYIVR |
| 2346 | LVQPHVPPLR |

TABLE 268
EBV Strain B95-8 EBNA2 HLA-B*07:02
Epitope Peptides

| SEQ ID NO. | Sequence |
|---|---|
| 2347 | TPSPPRMHL |
| 2348 | PPTPLLTVL |
| 2349 | EPSPLDRDPL |
| 2350 | PPRPTPPTPL |
| 2351 | PPRPTRPTTL |

TABLE 269
EBV Strain B95-8 EBNA2 HLA-B*08 Epitope Peptides

| SEQ ID NO. | Sequence |
|---|---|
| 2352 | SPLDRDPL |
| 2353 | SKRPRPSI |
| 2354 | PPRMHLPVL |
| 2355 | SRGDRGLIL |
| 2356 | RGKGKSRDK |

TABLE 270
EBV Strain B95-8 EBNA2 HLA-B*15:01 (B62)
Epitope Peptides

| SEQ ID NO. | Sequence |
|---|---|
| 2357 | PLDRDPLGY |
| 2358 | YLALHGGQTY |
| 2359 | SLSVIPSNPY |
| 2360 | DLDESWDYIF |
| 2361 | PLPPATLTVP |

TABLE 271
EBV Strain B95-8 EBNA2 HLA-B*18 Epitope Peptides

| SEQ ID NO. | Sequence |
|---|---|
| 2362 | PEPRSPTVF |
| 2363 | DESWDYIF |
| 2364 | QEQLSDTPL |
| 2365 | PELSPVLGL |
| 2366 | DEDYVEGP |

TABLE 272
EBV Strain B95-8 EBNA2 HLA-B*27:05
Epitope Peptides

| SEQ ID NO. | Sequence |
|---|---|
| 2367 | GRGKGKSRDK |
| 2368 | PRLTPPQPLM |
| 2369 | QRKPGGPWR |
| 2370 | PRPTPPTPL |
| 2371 | PRPTRPTTL |

TABLE 273
EBV Strain B95-8 EBNA2 HLA-B*35:01
Epitope Peptides

| SEQ ID NO. | Sequence |
|---|---|
| 2372 | EPRSPTVFY |
| 2373 | VPDQSMHPL |
| 2374 | LPPTPLLTVL |
| 2375 | SPPRMHLPVL |
| 2376 | SPLDRDPLGY |

TABLE 274
EBV Strain B95-8 EBNA2 HLA-B*58:02
Epitope Peptides

| SEQ ID NO. | Sequence |
|---|---|
| 2377 | RSPTVFYNI |
| 2378 | NSPEAPILF |
| 2379 | LALHGGQTY |
| 2380 | PSGPPWWPPI |
| 2381 | PSMPELSPVL |

TABLE 275
EBV Strain B95-8 EBNA2 HLA-DRB1*0101
Epitope Peptides

| SEQ ID NO. | Sequence |
|---|---|
| 2382 | QPHVPPLRPTAPTIL |
| 2383 | SNPYQEQLSDTPLIP |
| 2384 | PTVFYNIPPMPLPPS |
| 2385 | DQQLHHLPSGPPWWP |
| 2386 | RGLILPQGPQTAPQA |

TABLE 276
EBV Strain B95-8 EBNA2 HLA-DRB1*0301 (DR17)
Epitope Peptides

| SEQ ID NO. | Sequence |
|---|---|
| 2387 | PPGVINDQQLHHLPS |
| 2388 | PTILSPLSQPRLTPP |
| 2389 | TYHLIVDTDSLGNPS |
| 2390 | HLIVDTDSLGNPSLS |
| 2391 | ASAMRMLWMANYIVR |

TABLE 277
EBV Strain B95-8 EBNA2 HLA-DRB1*0401 (DR4Dw4)
Epitope Peptides

| SEQ ID NO. | Sequence |
|---|---|
| 2392 | MPTFYLALHGGQTYH |
| 2393 | GGPWRPEPNTSSPSM |
| 2394 | PTILSPLSQPRLTPP |
| 2395 | PTPLLTVLQRPTELQ |
| 2396 | DQSMHPLTHQSTPND |

TABLE 278
EBV Strain B95-8 EBNA2 HLA-DRB1*0701
Epitope Peptides

| SEQ ID NO. | Sequence |
|---|---|
| 2397 | NPSLSVIPSNPYQEQ |
| 2398 | PADLDESWDYIFETT |
| 2399 | DYIFETTESPSSDED |
| 2400 | YLALHGGQTYHLIVD |
| 2401 | YHLIVDTDSLGNPSL |

TABLE 279
EBV Strain B95-8 EBNA2 HLA-DRB1*1101
Epitope Peptides

| SEQ ID NO. | Sequence |
|---|---|
| 2402 | GQTYHLIVDTDSLGN |
| 2403 | TPLLTVLQRPTELQP |
| 2404 | PQPLMMPPRPTPPTP |
| 2405 | DQSMHPLTHQSTPND |
| 2406 | VINDQQLHHLPSGPP |

TABLE 280
EBV Strain B95-8 EBNA2 HLA-DRB1*1501 (DR2b)
Epitope Peptides

| SEQ ID NO. | Sequence |
|---|---|
| 2407 | LIPLTIFVGENTGVP |
| 2408 | YHLIVDTDSLGNPSL |
| 2409 | TIFVGENTGVPPPLP |
| 2410 | MLWMANYIVRQSRGD |
| 2411 | QPRLTPPQPLMMPPR |

[0310] Human Papillomavirus (HPV) Strain 16 E6 Antigenic Peptides

[0311] In some embodiments, the TVM or VM composition includes Human Papillomavirus (HPV) Strain 16 E6 specific T-cells. E6 specific T-cells can be generated as described below using one or more antigenic peptides to E6. In some embodiments, the E6 specific T-cells are generated using one or more antigenic peptides to E6, or a modified or heteroclitic peptide derived from a E6 peptide. In some embodiments, E6 specific T-cells are generated using a E6 antigen library comprising a pool of peptides (for example 15mers) containing amino acid overlap (for example 11 amino acids of overlap) between each sequence formed by scanning the protein amino acid sequence SEQ. ID. No. 2412 (UniProt KB—P03126) for HPV Strain 16-8 E6:

MHQKRTAMFQDPQERPRKLPQLCTELQTTIHDIILECVYCKQQLLRREVYD
FAFRDLCIVYRDGNPYAVCDKCLKFYSKISEYRHYCYSLYGTTLEQQYNKP
LCDLLIRCINCQKPLCPEEKQRHLDKKQRFHNIRGRWTGRCMSCCRSSRTR
RETQL.

[0312] In some embodiments, the E6 specific T-cells are generated using one or more antigenic peptides to E6, or a modified or heteroclitic peptide derived from a E6 peptide. In some embodiments, the E6 specific T-cells are generated with peptides that recognize class I MHC molecules. In some embodiments, the E6 specific T-cells are generated with peptides that recognize class II MHC molecules. In some embodiments, the E6 specific T-cells are generated with peptides that recognize both class I and class II MHC molecules.

[0313] In some embodiments, the E6 peptides used to prime and expand a T-cell subpopulation includes specifically selected HLA-restricted peptides generated by determining the HLA profile of the donor source, and including peptides derived from E6 that best match the donor's HLA. In some embodiments, the E6 peptides used to prime and expand a T-cell subpopulation are derived from HLA-restricted peptides selected from at least one or more of an HLA-A restricted peptide, HLA-B restricted peptide, or HLA-DR restricted peptide. Suitable methods for generating HLA-restricted peptides from an antigen have been described in, for example, Rammensee, HG., Bachmann, J., Emmerich, N. et al., SYFPEITHI: database for MHC ligands and peptide motifs. Immunogenetics (1999) 50: 213. https://doi.org/10.1007/s002510050595.

As provided herein, the HLA profile of a donor cell source can be determined, and T-cell subpopulations targeting E6 derived, wherein the T-cell subpopulation is primed and expanded using a group of peptides that are HLA-restricted to the donor's HLA profile. In certain embodiments, the T-cell subpopulation is exposed to a peptide mix that includes one or more HLA-A restricted, HLA-B restricted, and HLA-DR restricted peptides. In certain embodiments, the T-cell subpopulation is exposed to a peptide mix that includes HLA-A restricted, HLA-B restricted, and HLA-DR restricted peptides, wherein the HLA-A matched peptides are selected from the peptides of Tables 281-287, the HLA-B peptides are selected from the peptides of Tables 288-294, and the HLA-DR peptides are selected from the peptides of Tables 295-280. For example, if the donor cell source has an HLA profile that is HLA-A*01/*02:01; HLA-B*15:01/*18; and HLA-DRB1*0101/*0301, then the E6 peptides used to prime and expand the E6 specific T-cell subpopulation are restricted to the specific HLA profile, and may include the peptides identified in Table 281 (Seq. ID. Nos. 2413-2417) for HLA-A*01; Table 282 (Seq. ID. Nos. 2418-2422) for HLA-A*02:01; Table 290 (Seq. ID. Nos. 2458-2462) for HLA-B*15:01; Table 291 (Seq. ID. Nos. 2463-2467) for HLA-B*18; Table 295 (Seq. ID. Nos. 2483-2487) for HLA-DRB1*0101; and Table 296 (Seq. ID. Nos. 2488-2492) for HLA-DRB1*0301. In some embodiments, the mastermix of peptides includes both an overlapping peptide library and specifically selected HLA-restricted peptides generated by determining the HLA profile of the donor source.

[0314] In some embodiments, the E6 HLA-restricted epitopes are specific to at least both of the donor's HLA-A alleles, at least both of the donor's HLA-B alleles, and at least both of the donor's HLA-DR alleles. In some embodiments, the E6 HLA-A alleles are selected from a group comprising HLA-A*01, HLA-A*02:01, HLA-A*03, HLA-A*11:01, HLA-A*24:02, HLA-A*26, or HLA-A*68:01, and the corresponding E6 HLA-restricted peptides are selected for: HLA-A*01 from Table 281; HLA-A*02:01 from Table 282; HLA-A*03 from Table 283; HLA-A*11:01 from Table 284; HLA-A*24:02 from Table 285; HLA-A*26 from Table 286; or HLA-A*68:01 from Table 287; or any combination thereof. In some embodiments, the E6 HLA-B alleles are selected from a group comprising HLA-B*07:02, HLA-B*08, HLA-B*15:01 (B62), HLA-B*18, HLA-B*27:05, HLA-B*35:01, or HLA-B*58:02, and the corresponding E6 HLA-restricted peptides are selected for: HLA-B*07:02 from Table 288; HLA-B*08 from Table 289; HLA-B*15:01 (B62) from Table 290; HLA-B*18 from Table 291; HLA-B*27:05 from Table 292; HLA-B*35:01 from Table 293, or HLA-B*58:02 from Table 294; or any combination thereof. In some embodiments, the E6 HLA-DR alleles are selected from a group comprising HLA-DRB1*0101, HLA-DRB1*0301 (DR17), HLA-DRB1*0401 (DR4Dw4), HLA-DRB1*0701, HLA-DRB1*1101, or HLA-DRB1*1501 (DR2b) and the corresponding E6 HLA-restricted peptides are selected for: HLA-DRB1*0101 from Table 295; HLA-DRB1*0301 (DR17) from Table 296; HLA-DRB1*0401 (DR4Dw4) from Table 297; HLA-DRB1*0701 from Table 298; HLA-DRB1*1101 from Table 299; or HLA-DRB1*1501 (DR2b) from Table 300; or any combination thereof.

TABLE 281
HPV Strain 16 E6 HLA-A*01 Epitope Peptides

| SEQ ID NO. | Sequence |
|---|---|
| 2413 | YAVCDKCLKFY |
| 2414 | SEYRHYCYSLY |
| 2415 | CKQQLLRREVY |
| 2416 | IHDIILECVY |
| 2417 | YSKISEYRHY |

TABLE 282
HPV Strain 16 E6 HLA-A*02:01 Epitope Peptides

| SEQ ID NO. | Sequence |
|---|---|
| 2418 | TIHDIILECV |
| 2419 | QLCIELQTTI |
| 2420 | PLCDLLIRCI |
| 2421 | KLPQLCTEL |
| 2422 | QLCIELQTT |

TABLE 283
HPV Strain 16 E6 HLA-A*03 Epitope Peptides

| SEQ ID NO. | Sequence |
|---|---|
| 2423 | LLIRCINCQK |
| 2424 | DIILECVYCK |
| 2425 | CVYCKQQLLR |
| 2426 | SLYGTTLEQQ |
| 2427 | IVYRDGNPY |

TABLE 284
HPV Strain 16 E6 HLA-A*11:01 Epitope Peptides

| SEQ ID NO. | Sequence |
|---|---|
| 2428 | CVYCKQQLLR |
| 2429 | GTTLEQQYNK |
| 2430 | DIILECVYCK |
| 2431 | AFRDLCIVYR |
| 2432 | WTGRCMSCCR |

TABLE 285
HPV Strain 16 E6 HLA-A*24:02 Epitope Peptides

| SEQ ID NO. | Sequence |
|---|---|
| 2433 | QYNKPLCDLL |
| 2434 | QDPQERPRKL |
| 2435 | LCPEEKQRHL |
| 2436 | VYDFAFRDL |
| 2437 | PYAVCDKCL |

TABLE 286
HPV Strain 16 E6 HLA-A*26 Epitope Peptides

| SEQ ID NO. | Sequence |
|---|---|
| 2438 | EVYDFAFRDL |
| 2439 | AVCDKCLKFY |
| 2440 | EYRHYCYSLY |
| 2441 | DIILECVYCK |
| 2442 | CIVYRDGNPY |

TABLE 287
HPV Strain 16 E6 HLA-A*68:01 Epitope Peptides

| SEQ ID NO. | Sequence |
|---|---|
| 2443 | FAFRDLCIVYR |
| 2444 | RTAMFQDPQER |
| 2445 | CVYCKQQLLRR |
| 2446 | MSCCRSSRTRR |
| 2447 | DLLIRCINCQK |

TABLE 288
HPV Strain 16 E6 HLA-B*07:02 Epitope Peptides

| SEQ ID NO. | Sequence |
|---|---|
| 2448 | RPRKLPQLCT |
| 2449 | NPYAVCDKCL |
| 2450 | LPQLCTELQT |
| 2451 | QERPRKLPQL |
| 2452 | DPQERPRKL |

TABLE 289
HPV Strain 16 E6 HLA-B*08 Epitope Peptides

| SEQ ID NO. | Sequence |
|---|---|
| 2453 | CPEEKQRHL |
| 2454 | DPQERPRKL |
| 2455 | DKKQRFHNI |
| 2456 | ERPRKLPQL |
| 2457 | CVYCKQQLL |

TABLE 290
HPV Strain 16 E6 HLA-B*15:01 (B62)
Epitope Peptides

| SEQ ID NO. | Sequence |
|---|---|
| 2458 | KQQLLRREVY |
| 2459 | AVCDKCLKFY |
| 2460 | QLLRREVYDF |
| 2461 | QLCTELQTTI |
| 2462 | FAFRDLCIVY |

TABLE 291
HPV Strain 16 E6 HLA-B*18 Epitope Peptides

| SEQ ID NO. | Sequence |
|---|---|
| 2463 | LEQQYNKPL |
| 2464 | QQLLRREVY |
| 2465 | DPQERPRKL |
| 2466 | AFRDLCIVY |
| 2467 | REVYDFAF |

TABLE 292
HPV Strain 16 E6 HLA-B*27:05 Epitope Peptides

| SEQ ID NO. | Sequence |
|---|---|
| 2468 | RREVYDFAFR |
| 2469 | QRHLDKKQRF |
| 2470 | IRCINCQKPL |
| 2471 | LRREVYDFAF |
| 2472 | RKLPQLCTEL |

TABLE 293
HPV Strain 16 E6 HLA-B*35:01 Epitope Peptides

| SEQ ID NO. | Sequence |
|---|---|
| 2473 | NPYAVCDKCL |
| 2474 | FAFRDLCIVY |
| 2475 | LQTTIHDIIL |
| 2476 | KPLCDLLIRC |
| 2477 | ECVYCKQQLL |

TABLE 294
HPV Strain 16 E6 HLA-B*58:02 Epitope Peptides

| SEQ ID NO. | Sequence |
|---|---|
| 2478 | YSKISEYRHY |
| 2479 | EVYDFAFRDL |
| 2480 | SSRTRRETQL |
| 2481 | FAFRDLCIVY |
| 2482 | YAVCDKCLKF |

TABLE 295
HPV Strain 16 E6 HLA-DRB1*0101 Epitope Peptides

| SEQ ID NO. | Sequence |
|---|---|
| 2483 | IRCINCQKPLCPEEK |
| 2484 | CIVYRDGNPYAVCDK |
| 2485 | RHYCYSLYGTTLEQQ |
| 2486 | NKPLCDLLIRCINCQ |
| 2487 | DLLIRCINCQKPLCP |

TABLE 296
HPV Strain 16 E6 HLA-DRB1*0301 (DR17)
Epitope Peptides

| SEQ ID NO. | Sequence |
|---|---|
| 2488 | RTAMFQDPQERPRKL |
| 2489 | LCIVYRDGNPYAVCD |
| 2490 | EKQRHLDKKQRFHNI |
| 2491 | GTTLEQQYNKPLCDL |
| 2492 | NPYAVCDKCLKFYSK |

TABLE 297
HPV Strain 16 E6 HLA-DRB1*0401 (DR4Dw4)
Epitope Peptides

| SEQ ID NO. | Sequence |
|---|---|
| 2493 | PRKLPQLCTELQTTI |
| 2494 | LPQLCTELQTTIHDI |
| 2495 | FRDLCIVYRDGNPYA |
| 2496 | LCIVYRDGNPYAVCD |
| 2497 | REVYDFAFRDLCIVY |

TABLE 298
HPV Strain 16 E6 HLA-DRB1*0701 Epitope Peptides

| SEQ ID NO. | Sequence |
|---|---|
| 2498 | YSLYGTTLEQQYNKP |
| 2499 | CTELQTTIHDIILEC |
| 2500 | QTTIHDIILECVYCK |
| 2501 | LKFYSKISEYRHYCY |
| 2502 | GTTLEQQYNKPLCDL |

TABLE 299
HPV Strain 16 E6 HLA-DRB1*1101 Epitope Peptides

| SEQ ID NO. | Sequence |
|---|---|
| 2503 | FRDLCIVYRDGNPYA |
| 2504 | GNPYAVCDKCLKFYS |
| 2505 | REVYDFAFRDLCIVY |
| 2506 | DLLIRCINCQKPLCP |
| 2507 | LKFYSKISEYRHYCY |

TABLE 300
HPV Strain 16 E6 HLA-DRB1*1501 (DR2b)
Epitope Peptides

| SEQ ID NO. | Sequence |
|---|---|
| 2508 | DKCLKFYSKISEYRH |
| 2509 | RREVYDFAFRDLCIV |
| 2510 | IRCINCQKPLCPEEK |
| 2511 | LDKKQRFHNIRGRWT |
| 2512 | LECVYCKQQLLRREV |

[0315] Human Papillomavirus (HPV) Strain 16 E7 Antigenic Peptides

[0316] In some embodiments, the TVM or VM composition includes Human Papillomavirus (HPV) Strain 16 E7 specific T-cells. E7 specific T-cells can be generated as described below using one or more antigenic peptides to E7. In some embodiments, the E7 specific T-cells are generated using one or more antigenic peptides to E7, or a modified or heteroclitic peptide derived from a E7 peptide. In some embodiments, E7 specific T-cells are generated using a E7 antigen library comprising a pool of peptides (for example 15mers) containing amino acid overlap (for example 11 amino acids of overlap) between each sequence formed by scanning the protein amino acid sequence SEQ. ID. No. 2513 (UniProt KB—P03129) for HPV Strain 16-8 E7:

MEIGDTPTLHEYMLDLQPETTDLYCYEQLNDSSEEEDEIDGPAGQAEPDR
AHYNIVTFCCKCDSTLRLCVQSTHVDIRTLEDLLMGTLGIVCPICSQKP.

[0317] In some embodiments, the E7 specific T-cells are generated using one or more antigenic peptides to E7, or a modified or heteroclitic peptide derived from a E7 peptide. In some embodiments, the E7 specific T-cells are generated with peptides that recognize class I MHC molecules. In some embodiments, the E7 specific T-cells are generated with peptides that recognize class II MHC molecules. In some embodiments, the E7 specific T-cells are generated with peptides that recognize both class I and class II MHC molecules.

[0318] In some embodiments, the E7 peptides used to prime and expand a T-cell subpopulation includes specifically selected HLA-restricted peptides generated by determining the HLA profile of the donor source, and including peptides derived from E7 that best match the donor's HLA. In some embodiments, the E7 peptides used to prime and expand a T-cell subpopulation are derived from HLA-restricted peptides selected from at least one or more of an HLA-A restricted peptide, HLA-B restricted peptide, or HLA-DR restricted peptide. Suitable methods for generating HLA-restricted peptides from an antigen have been described in, for example, Rammensee, HG., Bachmann, J., Emmerich, N. et al., SYFPEITHI: database for MHC ligands and peptide motifs. Immunogenetics (1999) 50: 213. https://doi.org/10.1007/s002510050595.

As provided herein, the HLA profile of a donor cell source can be determined, and T-cell subpopulations targeting E7 derived, wherein the T-cell subpopulation is primed and expanded using a group of peptides that are HLA-restricted to the donor's HLA profile. In certain embodiments, the T-cell subpopulation is exposed to a peptide mix that includes one or more HLA-A restricted, HLA-B restricted, and HLA-DR restricted peptides. In certain embodiments, the T-cell subpopulation is exposed to a peptide mix that includes HLA-A restricted, HLA-B restricted, and HLA-DR restricted peptides, wherein the HLA-A matched peptides are selected from the peptides of Tables 301-307, the HLA-B peptides are selected from the peptides of Tables 308-314, and the HLA-DR peptides are selected from the peptides of Tables 315-320. For example, if the donor cell source has an HLA profile that is HLA-A*01/*02:01; HLA-B*15:01/*18; and HLA-DRB1*0101/*0301, then the E7 peptides used to prime and expand the E7 specific T-cell subpopulation are restricted to the specific HLA profile, and may include the peptides identified in Table 301 (Seq. ID. Nos. 2514-2518) for HLA-A*01; Table 302 (Seq. ID. Nos. 2519-2523) for HLA-A*02:01; Table 310 (Seq. ID. Nos. 2559-2563) for HLA-B*15:01; Table 311 (Seq. ID. Nos. 2564-2568) for HLA-B*18; Table 315 (Seq. ID. Nos. 2584-2588) for HLA-DRB1*0101; and Table 316 (Seq. ID. Nos. 2589-2593) for HLA-DRB1*0301. In some embodiments, the mastermix of peptides includes both an overlapping peptide library and specifically selected HLA-restricted peptides generated by determining the HLA profile of the donor source.

[0319] In some embodiments, the E7 HLA-restricted epitopes are specific to at least both of the donor's HLA-A alleles, at least both of the donor's HLA-B alleles, and at least both of the donor's HLA-DR alleles. In some embodiments, the E7 HLA-A alleles are selected from a group comprising HLA-A*01, HLA-A*02:01, HLA-A*03, HLA-A*11:01, HLA-A*24:02, HLA-A*26, or HLA-A*68:01, and the corresponding E7 HLA-restricted peptides are selected for: HLA-A*01 from Table 301; HLA-A*02:01 from Table 302; HLA-A*03 from Table 303; HLA-A*11:01 from Table 304; HLA-A*24:02 from Table 305; HLA-A*26 from Table 306; or HLA-A*68:01 from Table 307; or any combination thereof. In some embodiments, the E7 HLA-B alleles are selected from a group comprising HLA-B*07:02, HLA-B*08, HLA-B*15:01 (B62), HLA-B*18, HLA-B*27:05, HLA-B*35:01, or HLA-B*58:02, and the corresponding E7 HLA-restricted peptides are selected for: HLA-B*07:02 from Table 308; HLA-B*08 from Table 309; HLA-B*15:01 (B62) from Table 310; HLA-B*18 from Table 311; HLA-B*27:05 from Table 312; HLA-B*35:01 from Table 313, or HLA-B*58:02 from Table 314; or any combination thereof. In some embodiments, the E7 HLA-DR alleles are selected from a group comprising HLA-DRB1*0101, HLA-DRB1*0301 (DR17), HLA-DRB1*0401 (DR4Dw4), HLA-DRB1*0701, HLA-DRB1*1101, or HLA-DRB1*1501 (DR2b) and the corresponding E7 HLA-restricted peptides are selected for: HLA-DRB1*0101 from Table 315; HLA-DRB1*0301 (DR17) from Table 316; HLA-DRB1*0401 (DR4Dw4) from Table 317; HLA-DRB1*0701 from Table 318; HLA-DRB1*1101 from Table 319; or HLA-DRB1*1501 (DR2b) from Table 320; or any combination thereof.

TABLE 301
HPV Strain 16 E7 HLA-A*01 Epitope Peptides

| SEQ ID NO. | Sequence |
|---|---|
| 2514 | MHGDTPTLHEY |
| 2515 | HGDTPTLHEY |
| 2516 | QPETTDLYCY |
| 2517 | DLQPETTDLY |
| 2518 | QAEPDRAHY |

TABLE 302
HPV Strain 16 E7 HLA-A*02:01 Epitope Peptides

| SEQ ID NO. | Sequence |
|---|---|
| 2519 | DLLMGTLGIV |
| 2520 | TLEDLLMGTL |
| 2521 | LLMGTLGIV |
| 2522 | TLHEYMLDL |
| 2523 | DLQPETTDL |

TABLE 303
HPV Strain 16 E7 HLA-A*03 Epitope Peptides

| SEQ ID NO. | Sequence |
|---|---|
| 2524 | TLRLCVQSTH |
| 2525 | GIVCPICSQK |
| 2526 | DLQPETTDLY |
| 2527 | LLMGTLGIVC |
| 2528 | IVCPICSQK |

TABLE 304
HPV Strain 16 E7 HLA-A*11:01 Epitope Peptides

| SEQ ID NO. | Sequence |
|---|---|
| 2529 | CVQSTHVDIR |
| 2530 | GIVCPICSQK |
| 2531 | SSEEEDEIDG |
| 2532 | IVCPICSQK |
| 2533 | STLRLCVQS |

TABLE 305
HPV Strain 16 E7 HLA-A*24:02 Epitope Peptides

| SEQ ID NO. | Sequence |
|---|---|
| 2534 | TFCCKCDSTL |
| 2535 | VDIRTLEDLL |
| 2536 | AEPDRAHYNI |
| 2537 | TDLYCYEQL |
| 2538 | GTLGIVCPI |

TABLE 306
HPV Strain 16 E7 HLA-A*26 Epitope Peptides

| SEQ ID NO. | Sequence |
|---|---|
| 2539 | DTPTLHEYML |
| 2540 | HVDIRTLEDL |
| 2541 | DRAHYNIVTF |
| 2542 | STHVDIRTL |
| 2543 | ETTDLYCYE |

TABLE 307
HPV Strain 16 E7 HLA-A*68:01 Epitope Peptides

| SEQ ID NO. | Sequence |
|---|---|
| 2544 | TFCCKCDSTLR |
| 2545 | ETTDLYCYEQL |
| 2546 | CVQSTHVDIR |
| 2547 | IVCPICSQK |
| 2548 | PAGQAEPDR |

TABLE 308
HPV Strain 16 E7 HLA-B*07:02 Epitope Peptides

| SEQ ID NO. | Sequence |
|---|---|
| 2549 | EPDRAHYNIV |
| 2550 | GPAGQAEPDR |
| 2551 | CCKCDSTLRL |
| 2552 | TPTLHEYML |
| 2553 | EIDGPAGQA |

TABLE 309
HPV Strain 16 E7 HLA-B*08 Epitope Peptides

| SEQ ID NO. | Sequence |
|---|---|
| 2554 | DIRTLEDLL |
| 2555 | TLHEYMLDL |
| 2556 | TPTLHEYML |
| 2557 | DLQPETTDL |
| 2558 | CCKCDSTL |

TABLE 310
HPV Strain 16 E7 HLA-B*15:01 (B62) Epitope Peptides

| SEQ ID NO. | Sequence |
|---|---|
| 2559 | DLQPETTDLY |
| 2560 | GQAEPDRAHY |
| 2561 | TLRLCVQSTH |
| 2562 | LLMGTLGIVC |
| 2563 | LQPETTDLY |

TABLE 311
HPV Strain 16 E7 HLA-B*18 Epitope Peptides

| SEQ ID NO. | Sequence |
|---|---|
| 2564 | LEDLLMGTL |
| 2565 | PETTDLYCY |
| 2566 | DEIDGPAGQ |
| 2567 | DIRTLEDLL |
| 2568 | AEPDRAHY |

TABLE 312
HPV Strain 16 E7 HLA-B*27:05 Epitope Peptides

| SEQ ID NO. | Sequence |
|---|---|
| 2569 | DRAHYNIVTF |
| 2570 | LDLQPETTDL |
| 2571 | LRLCVQSTH |
| 2572 | IRTLEDLLM |
| 2573 | RAHYNIVTF |

TABLE 313
HPV Strain 16 E7 HLA-B*35:01 Epitope Peptides

| SEQ ID NO. | Sequence |
|---|---|
| 2574 | QPETTDLYCY |
| 2575 | TPTLHEYML |
| 2576 | EPDRAHYNI |
| 2577 | FCCKCDSTL |
| 2578 | LEDLLMGTL |

TABLE 314
HPV Strain 16 E7 HLA-B*58:02 Epitope Peptides

| SEQ ID NO. | Sequence |
|---|---|
| 2579 | QSTHVDIRTL |
| 2580 | RAHYNIVTF |
| 2581 | DSSEEEDEI |
| 2582 | GTLGIVCPI |
| 2583 | DTPTLHEYM |

TABLE 315
HPV Strain 16 E7 HLA-DRB1*0101 Epitope Peptides

| SEQ ID NO. | Sequence |
|---|---|
| 2584 | MGTLGIVCPICSQKP |
| 2585 | HVDIRTLEDLLMGTL |
| 2586 | DLLMGTLGIVCPICS |
| 2587 | IRTLEDLLMGTLGIV |
| 2588 | TLEDLLMGTLGIVCP |

TABLE 316
HPV Strain 16 E7 HLA-DRB1*0301 (DR17) Epitope
Peptides

| SEQ ID NO. | Sequence |
|---|---|
| 2589 | TFCCKCDSTLRLCVQ |
| 2590 | MLDLQPETTDLYCYE |
| 2591 | TTDLYCYEQLNDSSE |
| 2592 | IRTLEDLLMGTLGIV |
| 2593 | LHEYMLDLQPETTDL |

TABLE 317
HPV Strain 16 E7 HLA-DRB1*0401 (DR4Dw4) Epitope
Peptides

| SEQ ID NO. | Sequence |
|---|---|
| 2594 | LHEYMLDLQPETTDL |
| 2595 | TDLYCYEQLNDSSEE |
| 2596 | RAHYNIVTFCCKCDS |
| 2597 | HEYMLDLQPETTDLY |
| 2598 | MLDLQPETTDLYCYE |

TABLE 318
HPV Strain 16 E7 HLA-DRB1*0701 Epitope Peptides

| SEQ ID NO. | Sequence |
|---|---|
| 2599 | IVTFCCKCDSTLRLC |
| 2600 | MLDLQPETTDLYCYE |
| 2601 | THVDIRTLEDLLMGT |
| 2602 | HVDIRTLEDLLMGTL |
| 2603 | YEQLNDSSEEEDEID |

TABLE 319
HPV Strain 16 E7 HLA-DRB1*1101 Epitope Peptides

| SEQ ID NO. | Sequence |
|---|---|
| 2604 | YNIVTFCCKCDSTLR |
| 2605 | DLLMGTLGIVCPICS |
| 2606 | MGTLGIVCPICSQKP |
| 2607 | TDLYCYEQLNDSSEE |
| 2608 | LYCYEQLNDSSEEED |

TABLE 320
HPV Strain 16 E7 HLA-DRB1*1501 (DR2b) Epitope
Peptides

| SEQ ID NO. | Sequence |
|---|---|
| 2609 | TTDLYCYEQLNDSSE |
| 2610 | TPTLHEYMLDLQPET |
| 2611 | EDLLMGTLGIVCPIC |
| 2612 | MGTLGIVCPICSQKP |
| 2613 | HYNIVTFCCKCDSTL |

[0320] Human Papillomavirus (HPV) Strain 16 E7 Antigenic Peptides

[0321] In some embodiments, the TVM or VM composition includes Human Papillomavirus (HPV) Strain 16 E7 specific T-cells. E7 specific T-cells can be generated as described below using one or more antigenic peptides to E7. In some embodiments, the E7 specific T-cells are generated using one or more antigenic peptides to E7, or a modified or heteroclitic peptide derived from a E7 peptide. In some embodiments, E7 specific T-cells are generated using a E7 antigen library comprising a pool of peptides (for example 15mers) containing amino acid overlap (for example 11 amino acids of overlap) between each sequence formed by scanning the protein amino acid sequence SEQ. ID. No. 2513 (UniProt KB—P03129) for HPV Strain 16-8 E7:

MHGDTPTLHEYMLDLQPETTDLYCYEQLNDSSEEEDEIDGPAGQAEPDRA
HYNIVTFCCKCDSTLRLCVQSTHVDIRTLEDLLMGTLGIVCPICSQKP.

[0322] In some embodiments, the E7 specific T-cells are generated using one or more antigenic peptides to E7, or a modified or heteroclitic peptide derived from a E7 peptide. In some embodiments, the E7 specific T-cells are generated with peptides that recognize class I MHC molecules. In some embodiments, the E7 specific T-cells are generated with peptides that recognize class II MHC molecules. In some embodiments, the E7 specific T-cells are generated with peptides that recognize both class I and class II MHC molecules.

[0323] In some embodiments, the E7 peptides used to prime and expand a T-cell subpopulation includes specifically selected HLA-restricted peptides generated by determining the HLA profile of the donor source, and including peptides derived from E7 that best match the donor's HLA. In some embodiments, the E7 peptides used to prime and expand a T-cell subpopulation are derived from HLA-restricted peptides selected from at least one or more of an HLA-A restricted peptide, HLA-B restricted peptide, or HLA-DR restricted peptide. Suitable methods for generating HLA-restricted peptides from an antigen have been described in, for example, Rammensee, HG., Bachmann, J., Emmerich, N. et al., SYFPEITHI: database for MHC ligands and peptide motifs. Immunogenetics (1999) 50: 213. https://doi.org/10.1007/s002510050595.

[0324] As provided herein, the HLA profile of a donor cell source can be determined, and T-cell subpopulations targeting E7 derived, wherein the T-cell subpopulation is primed and expanded using a group of peptides that are HLA-restricted to the donor's HLA profile. In certain embodiments, the T-cell subpopulation is exposed to a peptide mix that includes one or more HLA-A restricted, HLA-B restricted, and HLA-DR restricted peptides. In certain embodiments, the T-cell subpopulation is exposed to a peptide mix that includes HLA-A restricted, HLA-B restricted, and HLA-DR restricted peptides, wherein the HLA-A matched peptides are selected from the peptides of Tables 301-307, the HLA-B peptides are selected from the peptides of Tables 308-314, and the HLA-DR peptides are selected from the peptides of Tables 315-320. For example, if the donor cell source has an HLA profile that is HLA-A*01/*02:01; HLA-B*15:01/*18; and HLA-DRB1*0101/*0301, then the E7 peptides used to prime and expand the E7 specific T-cell subpopulation are restricted to the specific HLA profile, and may include the peptides identified in Table 301 (Seq. ID. Nos. 2514-2518) for HLA-A*01; Table 302 (Seq. ID. Nos. 2519-2523) for HLA-A*02:01; Table 310 (Seq. ID. Nos. 2559-2563) for HLA-B*15:01; Table 311 (Seq. ID. Nos. 2564-2568) for HLA-B*18; Table 315 (Seq. ID. Nos. 2584-2588) for HLA-DRB1*0101; and Table 316 (Seq. ID. Nos. 2589-2593) for HLA-DRB1*0301. In some embodiments, the mastermix of peptides includes both an overlapping peptide library and specifically selected HLA-restricted peptides generated by determining the HLA profile of the donor source.

[0325] In some embodiments, the HPV E7 HLA-restricted epitopes are specific to at least both of the donor's HLA-A alleles, at least both of the donor's HLA-B alleles, and at least both of the donor's HLA-DR alleles. In some embodiments, the HPV E7 HLA-A alleles are selected from a group comprising HLA-A*01, HLA-A*02:01, HLA-A*03, HLA-A*11:01, HLA-A*24:02, HLA-A*26, or HLA-A*68:01, and the corresponding HPV E7 HLA-restricted peptides are selected for: HLA-A*01 from Table 301; HLA-A*02:01 from Table 302; HLA-A*03 from Table 303; HLA-A*11:01 from Table 304; HLA-A*24:02 from Table 305; HLA-A*26 from Table 306; or HLA-A*68:01 from Table 307; or any combination thereof. In some embodiments, the HPV E7 HLA-B alleles are selected from a group comprising HLA-B*07:02, HLA-B*08, HLA-B*15:01 (B62), HLA-B*18, HLA-B*27:05, HLA-B*35:01, or HLA-B*58:02, and the corresponding HPV E7 HLA-restricted peptides are selected for: HLA-B*07:02 from Table 308; HLA-B*08 from Table 309; HLA-B*15:01 (B62) from Table 310; HLA-B*18 from Table 311; HLA-B*27:05 from Table 312; HLA-B*35:01 from Table 313, or HLA-B*58:02 from Table 314; or any combination thereof. In some embodiments, the HPV E7 HLA-DR alleles are selected from a group comprising HLA-DRB1*0101, HLA-DRB1*0301 (DR17), HLA-DRB1*0401 (DR4Dw4), HLA-DRB1*0701, HLA-DRB1*1101, or HLA-DRB1*1501 (DR2b) and the corresponding HPV E7 HLA-restricted peptides are selected for: HLA-DRB1*0101 from Table 315; HLA-DRB1*0301 (DR17) from Table 316; HLA-DRB1*0401 (DR4Dw4) from Table 317; HLA-DRB1*0701 from Table 318; HLA-DRB1*1101 from Table 319; or HLA-DRB1*1501 (DR2b) from Table 320; or any combination thereof.

TABLE 301
HPV Strain 16 E7 HLA-A*01 Epitope Peptides

| SEQ ID NO. | Sequence |
|---|---|
| 2514 | MHGDTPTLHEY |
| 2515 | HGDTPTLHEY |
| 2516 | QPETTDLYCY |
| 2517 | DLQPETTDLY |
| 2518 | QAEPDRAHY |

TABLE 302
HPV Strain 16 E7 HLA-A*02:01 Epitope Peptides

| SEQ ID NO. | Sequence |
|---|---|
| 2519 | DLLMGTLGIV |
| 2520 | TLEDLLMGTL |
| 2521 | LLMGTLGIV |
| 2522 | TLHEYMLDL |
| 2523 | DLQPETTDL |

TABLE 303
HPV Strain 16 E7 HLA-A*03 Epitope Peptides

| SEQ ID NO. | Sequence |
|---|---|
| 2524 | TLRLCVQSTH |
| 2525 | GIVCPICSQK |
| 2526 | DLQPETTDLY |
| 2527 | LLMGTLGIVC |
| 2528 | IVCPICSQK |

TABLE 304
HPV Strain 16 E7 HLA-A*11:01 Epitope Peptides

| SEQ ID NO. | Sequence |
|---|---|
| 2529 | CVQSTHVDIR |
| 2530 | GIVCPICSQK |
| 2531 | SSEEEDEIDG |
| 2532 | IVCPICSQK |
| 2533 | STLRLCVQS |

TABLE 305
HPV Strain 16 E7 HLA-A*24:02 Epitope Peptides

| SEQ ID NO. | Sequence |
|---|---|
| 2534 | TFCCKCDSTL |
| 2535 | VDIRTLEDLL |
| 2536 | AEPDRAHYNI |
| 2537 | TDLYCYEQL |
| 2538 | GTLGIVCPI |

TABLE 306
HPV Strain 16 E7 HLA-A*26 Epitope Peptides

| SEQ ID NO. | Sequence |
|---|---|
| 2539 | DTPTLHEYML |
| 2540 | HVDIRTLEDL |
| 2541 | DRAHYNIVTF |
| 2542 | STHVDIRTL |
| 2543 | ETTDLYCYE |

TABLE 307
HPV Strain 16 E7 HLA-A*68:01 Epitope
Peptides

| SEQ ID NO. | Sequence |
|---|---|
| 2544 | TFCCKCDSTLR |
| 2545 | ETTDLYCYEQL |
| 2546 | CVQSTHVDIR |
| 2547 | IVCPICSQK |
| 2548 | PAGQAEPDR |

TABLE 308
HPV Strain 16 E7 HLA-B*07:02 Epitope Peptides

| SEQ ID NO. | Sequence |
|---|---|
| 2549 | EPDRAHYNIV |
| 2550 | GPAGQAEPDR |
| 2551 | CCKCDSTLRL |
| 2552 | TPTLHEYML |
| 2553 | EIDGPAGQA |

TABLE 309
HPV Strain 16 E7 HLA-B*08 Epitope Peptides

| SEQ ID NO. | Sequence |
|---|---|
| 2554 | DIRTLEDLL |
| 2555 | TLHEYMLDL |
| 2556 | TPTLHEYML |
| 2557 | DLQPETTDL |
| 2558 | CCKCDSTL |

TABLE 310
HPV Strain 16 E7 HLA-B*15:01 (B62) Epitope
Peptides

| SEQ ID NO. | Sequence |
|---|---|
| 2559 | DLQPETTDLY |
| 2560 | GQAEPDRAHY |
| 2561 | TLRLCVQSTH |
| 2562 | LLMGTLGIVC |
| 2563 | LQPETTDLY |

TABLE 311
HPV Strain 16 E7 HLA-B*18 Epitope Peptides

| SEQ ID NO. | Sequence |
|---|---|
| 2564 | LEDLLMGTL |
| 2565 | PETTDLYCY |
| 2566 | DEIDGPAGQ |
| 2567 | DIRTLEDLL |
| 2568 | AEPDRAHY |

TABLE 312
HPV Strain 16 E7 HLA-B*27:05 Epitope Peptides

| SEQ ID NO. | Sequence |
|---|---|
| 2569 | DRAHYNIVTF |
| 2570 | LDLQPETTDL |
| 2571 | LRLCVQSTH |
| 2572 | IRTLEDLLM |
| 2573 | RAHYNIVTF |

TABLE 313
HPV Strain 16 E7 HLA-B*35:01 Epitope Peptides

| SEQ ID NO. | Sequence |
|---|---|
| 2574 | QPETTDLYCY |
| 2575 | TPTLHEYML |
| 2576 | EPDRAHYNI |
| 2577 | FCCKCDSTL |
| 2578 | LEDLLMGTL |

TABLE 314
HPV Strain 16 E7 HLA-B*58:02 Epitope Peptides

| SEQ ID NO. | Sequence |
|---|---|
| 2579 | QSTHVDIRTL |
| 2580 | RAHYNIVTF |
| 2581 | DSSEEEDEI |
| 2582 | GTLGIVCPI |
| 2583 | DTPTLHEYM |

TABLE 315
HPV Strain 16 E7 HLA-DRB1*0101 Epitope Peptides

| SEQ ID NO. | Sequence |
|---|---|
| 2584 | MGTLGIVCPICSQKP |
| 2585 | HVDIRTLEDLLMGTL |
| 2586 | DLLMGTLGIVCPICS |
| 2587 | IRTLEDLLMGTLGIV |
| 2588 | TLEDLLMGTLGIVCP |

TABLE 316
HPV Strain 16 E7 HLA-DRB1*0301 (DR17) Epitope
Peptides

| SEQ ID NO. | Sequence |
|---|---|
| 2589 | TFCCKCDSTLRLCVQ |
| 2590 | MLDLQPETTDLYCYE |
| 2591 | TTDLYCYEQLNDSSE |
| 2592 | IRTLEDLLMGTLGIV |
| 2593 | LHEYMLDLQPETTDL |

TABLE 317
HPV Strain 16 E7 HLA-DRB1*0401 (DR4Dw4) Epitope
Peptides

| SEQ ID NO. | Sequence |
|---|---|
| 2594 | LHEYMLDLQPETTDL |
| 2595 | TDLYCYEQLNDSSEE |
| 2596 | RAHYNIVTFCCKCDS |
| 2597 | HEYMLDLQPETTDLY |
| 2598 | MLDLQPETTDLYCYE |

TABLE 318
HPV Strain 16 E7 HLA-DRB1*0701 Epitope Peptides

| SEQ ID NO. | Sequence |
|---|---|
| 2599 | IVTFCCKCDSTLRLC |
| 2600 | MLDLQPETTDLYCYE |
| 2601 | THVDIRTLEDLLMGT |
| 2602 | HVDIRTLEDLLMGTL |
| 2603 | YEQLNDSSEEEDEID |

TABLE 319
HPV Strain 16 E7 HLA-DRB1*1101 Epitope Peptides

| SEQ ID NO. | Sequence |
|---|---|
| 2604 | YNIVTFCCKCDSTLR |
| 2605 | DLLMGTLGIVCPICS |
| 2606 | MGTLGIVCPICSQKP |
| 2607 | TDLYCYEQLNDSSEE |
| 2608 | LYCYEQLNDSSEEED |

TABLE 320
HPV Strain 16 E7 HLA-DRB1*1501 (DR2b) Epitope
Peptides

| SEQ ID NO. | Sequence |
|---|---|
| 2609 | TTDLYCYEQLNDSSE |
| 2610 | TPTLHEYMLDLQPET |
| 2611 | EDLLMGTLGIVCPIC |
| 2612 | MGTLGIVCPICSQKP |
| 2613 | HYNIVTFCCKCDSTL |

### Human Cytomegalovirus (HCMV) Strain HHV-5 Antigenic Peptides

[0326] In some embodiments, the TVM or VM composition includes Human Cytomegalovirus (HCMV) pp65 specific T-cells. pp65 specific T-cells can be generated as described below using one or more antigenic peptides to pp65. In some embodiments, the pp65 specific T-cells are generated using one or more antigenic peptides to pp65, or a modified or heteroclitic peptide derived from a pp65 peptide. In some embodiments, pp65 specific T-cells are generated using a pp65 antigen library comprising a pool of peptides (for example 15mers) containing amino acid overlap (for example 11 amino acids of overlap) between each sequence formed by scanning the protein amino acid sequence SEQ. ID. No. 2614 (UniProt KB—P06725) for HCMV Strain HHV-5 pp65:

MESRGRRCPEMISVLGPISGHVLKAVFSRGDTPVLPHETRLLQTGIHVRVS
QPSLILVSQYTPDSTPCHRGDNQLQVQHTYFTGSEVENVSVNVHNPTGRSI
CPSQEPMSIYVYALPLKMLNIPSINVHHYPSAAERKHRHLPVADAVIHASG
KQMWQARLTVSGLAWTRQQNQWKEPDVYYTSAFVFPTKDVALRHVVCAHEL
VCSMENTRATKMQVIGDQYVKVYLESFCEDVPSGKLFMHVTLGSDVEEDLT
MTRNPQPFMRPHERNGFTVLCPKNMIIKPGKISHIMLDVAFTSHEHEGLLC
PKSIPGLSISGNLLMNGQQIFLEVQAIRETVELRQYDPVAALFFFDIDLLL
QRGPQYSEHPTFTSQYRIQGKLEYRHTWDRHDEGAAQGDDDVWTSGSDSDE
ELVTTERKTPRVTGGGAMAGASTSAGRKRKSASSATACTSGVMTRGRLKAE
STVAPEEDTDEDSDNEIHNPAVFTWPPWQAGILARNLVPMVATVQGQNLKY
QEFFWDANDIYRIFAELEGVWQPAAQPKRRRHRQDALPGPCIASTPKKHRG

[0327] In some embodiments, the pp65 specific T-cells are generated using one or more antigenic peptides to pp65, or a modified or heteroclitic peptide derived from a pp65 peptide. In some embodiments, the pp65 specific T-cells are generated with peptides that recognize class I MHC molecules. In some embodiments, the pp65 specific T-cells are generated with peptides that recognize class II MHC molecules. In some embodiments, the pp65 specific T-cells are generated with peptides that recognize both class I and class II MHC molecules.

[0328] In some embodiments, the pp65 peptides used to prime and expand a T-cell subpopulation includes specifically selected HLA-restricted peptides generated by determining the HLA profile of the donor source, and including peptides derived from pp65 that best match the donor's HLA. In some embodiments, the pp65 peptides used to prime and expand a T-cell subpopulation are derived from HLA-restricted peptides selected from at least one or more of an HLA-A restricted peptide, HLA-B restricted peptide, or HLA-DR restricted peptide. Suitable methods for generating HLA-restricted peptides from an antigen have been described in, for example, Rammensee, HG., Bachmann, J., Emmerich, N. et al., SYFPEITHI: database for MHC ligands and peptide motifs. Immunogenetics (1999) 50: 213. https://doi.org/10.1007/s002510050595.

[0329] As provided herein, the HLA profile of a donor cell source can be determined, and T-cell subpopulations targeting pp65 derived, wherein the T-cell subpopulation is primed and expanded using a group of peptides that are HLA-restricted to the donor's HLA profile. In certain embodiments, the T-cell subpopulation is exposed to a peptide mix that includes one or more HLA-A restricted, HLA-B restricted, and HLA-DR restricted peptides. In certain embodiments, the T-cell subpopulation is exposed to a peptide mix that includes HLA-A restricted, HLA-B restricted, and HLA-DR restricted peptides, wherein the HLA-A matched peptides are selected from the peptides of Tables 321-327, the HLA-B peptides are selected from the peptides of Tables 328-334, and the HLA-DR peptides are selected from the peptides of Tables 325-340. For example, if the donor cell source has an HLA profile that is HLA-A*01/*02:01; HLA-B*15:01/*18; and HLA-DRB1*0101/*0301, then the pp65 peptides used to prime and expand the pp65 specific T-cell subpopulation are restricted to the specific HLA profile, and may include the peptides identified in Table 321 (Seq. ID. Nos. 2615-2619) for HLA-A*01; Table 322 (Seq. ID. Nos. 2620-2624) for HLA-A*02:01; Table 330 (Seq. ID. Nos. 2660-2664) for HLA-B*15:01; Table 331 (Seq. ID. Nos. 2665-2669) for HLA-B*18; Table 335 (Seq. ID. Nos. 2685-2689) for HLA-DRB1*0101; and Table 336 (Seq. ID. Nos. 2690-2694) for HLA-DRB1*0301.

[0330] In some embodiments, the HCMV pp65 HLA-restricted epitopes are specific to at least both of the donor's HLA-A alleles, at least both of the donor's HLA-B alleles, and at least both of the donor's HLA-DR alleles. In some embodiments, the HCMV pp65 HLA-A alleles are selected from a group comprising HLA-A*01, HLA-A*02:01, HLA-A*03, HLA-A*11:01, HLA-A*24:02, HLA-A*26, or HLA-A*68:01, and the corresponding HCMV pp65 HLA-restricted peptides are selected for: HLA-A*01 from Table 321; HLA-A*02:01 from Table 322; HLA-A*03 from Table 323; HLA-A*11:01 from Table 324; HLA-A*24:02 from Table 325; HLA-A*26 from Table 326; or HLA-A*68:01 from Table 327; or any combination thereof. In some embodiments, the HCMV pp65 HLA-B alleles are selected from a group comprising HLA-B*07:02, HLA-B*08, HLA-B*15:01 (B62), HLA-B*18, HLA-B*27:05, HLA-B*35:01, or HLA-B*58:02, and the corresponding HCMV pp65 HLA-restricted peptides are selected for: HLA-B*07:02 from Table 328; HLA-B*08 from Table 329; HLA-B*15:01 (B62) from Table 330; HLA-B*18 from Table 331; HLA-B*27:05 from Table 332; HLA-B*35:01 from Table 333, or HLA-B*58:02 from Table 334; or any combination thereof. In some embodiments, the HCMV pp65 HLA-DR alleles are selected from a group comprising HLA-DRB1*0101, HLA-DRB1*0301 (DR17), HLA-DRB1*0401 (DR4Dw4), HLA-DRB1*0701, HLA-DRB1*1101, or HLA-DRB1*1501 (DR2b) and the corresponding HCMV pp65 HLA-restricted peptides are selected for: HLA-DRB1*0101 from Table 335; HLA-DRB1*0301 (DR17) from Table 336; HLA-DRB1*0401 (DR4Dw4) from Table 337; HLA-DRB1*0701 from Table 338; HLA-DRB1*1101 from Table 339; or HLA-DRB1*1501 (DR2b) from Table 340; or any combination thereof.

TABLE 321
HCMV pp65 HLA-A*01 Epitope Peptides

| SEQ ID NO. | Sequence |
|---|---|
| 2615 | YSEHPTFTSQY |
| 2616 | ATKMQVIGDQY |
| 2617 | SQYRIQGKLEY |
| 2618 | PSQEPMSIYVY |
| 2619 | ATVQGQNLKY |

TABLE 322
HCMV pp65 HLA-A*02:01 Epitope Peptides

| SEQ ID NO. | Sequence |
|---|---|
| 2620 | LLCPKSIPGL |
| 2621 | ILARNLVPMV |
| 2622 | ALFFFDIDLL |
| 2623 | ALPGPCIAST |
| 2624 | VLGPISGHVL |

TABLE 323
HCMV pp65 HLA-A*03 Epitope Peptides

| SEQ ID NO. | Sequence |
|---|---|
| 2625 | DVYYTSAFVF |
| 2626 | DLLLQRGPQY |
| 2627 | RLLQTGIHVR |
| 2628 | SIYVYALPLK |
| 2629 | VLCPKNMIIK |

TABLE 324
HCMV pp65 HLA-A*11:01 Epitope Peptides

| SEQ ID NO. | Sequence |
|---|---|
| 2630 | ASTSAGRKRK |
| 2631 | GVWQPAAQPK |
| 2632 | SVNVHNPTGR |
| 2633 | SIYVYALPLK |
| 2634 | YTSAFVFPTK |

TABLE 325
HCMV pp65 HLA-A*24:02 Epitope Peptides

| SEQ ID NO. | Sequence |
|---|---|
| 2635 | QYVKVYLESF |
| 2636 | QYDPVAALFF |
| 2637 | VFPTKDVAL |
| 2638 | VYYTSAFVF |
| 2639 | VYALPLKML |

TABLE 326
HCMV pp65 HLA-A*26 Epitope Peptides

| SEQ ID NO. | Sequence |
|---|---|
| 2640 | DVYYTSAFVF |
| 2641 | DVAFTSHEHF |
| 2642 | EVENVSVNVH |
| 2643 | EPMSIYVYAL |
| 2644 | FVFPTKDVAL |

TABLE 327
HCMV pp65 HLA-A*68:01 Epitope Peptides

| SEQ ID NO. | Sequence |
|---|---|
| 2645 | ELVTTERKTPR |
| 2646 | NVHHYPSAAER |
| 2647 | FVFPTKDVALR |
| 2648 | TVLCPKNMIIK |
| 2649 | DSDEELVTTER |

TABLE 328
HCMV pp65 HLA-B*07:02 Epitope Peptides

| SEQ ID NO. | Sequence |
|---|---|
| 2650 | EPMSIYVYAL |
| 2651 | KPGKISHIML |
| 2652 | IPGLSISGNL |
| 2653 | TPVLPHETRL |
| 2654 | VPSGKLFMHV |

TABLE 329
HCMV pp65 HLA-B*08 Epitope Peptides

| SEQ ID NO. | Sequence |
|---|---|
| 2655 | RRRHRQDAL |
| 2656 | AAERKHRHL |
| 2657 | VLCPKNMII |
| 2658 | QPKRRRHRQ |
| 2659 | ALPLKMLNI |

TABLE 330
HCMV pp65 HLA-B*15:01 (B62) Epitope Peptides

| SEQ ID NO. | Sequence |
|---|---|
| 2660 | NQWKEPDVYY |
| 2661 | RQYDPVAALF |
| 2662 | SQEPMSIYVY |
| 2663 | NQLQVQHTYF |
| 2664 | NLLMNGQQIF |

TABLE 331
HCMV pp65 HLA-B*18 Epitope Peptides

| SEQ ID NO. | Sequence |
|---|---|
| 2665 | NEIHNPAVF |
| 2666 | QEPMSIYVY |
| 2667 | AERKHRHL |
| 2668 | DPVAALFF |
| 2669 | DEELVTTE |

TABLE 332
HCMV pp65 HLA-B*27:05 Epitope Peptides

| SEQ ID NO. | Sequence |
|---|---|
| 2670 | RRCPEMISVL |
| 2671 | YRIQGKLEYR |
| 2672 | KRRRHRQDAL |
| 2673 | VRVSQPSLIL |
| 2674 | RLLQTGIHVR |

TABLE 333
HCMV pp65 HLA-B*35:01 Epitope Peptides

| SEQ ID NO. | Sequence |
|---|---|
| 2675 | DPVAALFFF |
| 2676 | WPPWQAGIL |
| 2677 | IPSINVHHY |
| 2678 | KPGKISHIM |
| 2679 | CPSQEPMSI |

TABLE 334
HCMV pp65 HLA-B*58:02 Epitope Peptides

| SEQ ID NO. | Sequence |
|---|---|
| 2680 | RSICPSQEPM |
| 2681 | PVLPHETRLL |
| 2682 | SAAERKHRHL |
| 2683 | MSIYVYALPL |
| 2684 | GSDVEEDLTM |

TABLE 335
HCMV pp65 HLA-DRB1*0101 Epitope Peptides

| SEQ ID NO. | Sequence |
|---|---|
| 2685 | RNGFTVLCPKNMIIK |
| 2686 | HEHFGLLCPKSIPGL |
| 2687 | LRQYDPVAALFFFDI |
| 2688 | CPEMISVLGPISGHV |
| 2689 | ISVLGPISGHVLKAV |

TABLE 336
HCMV pp65 HLA-DRB1*0301 (DR17) Epitope Peptides

| SEQ ID NO. | Sequence |
|---|---|
| 2690 | HVTLGSDVEEDLTMT |
| 2691 | YQEFFWDANDIYRIF |
| 2692 | SGNLLMNGQQIFLEV |
| 2693 | QPFMRPHERNGFTVL |
| 2694 | AALFFFDIDLLLQRG |

TABLE 337
HCMV pp65 HLA-DRB1*0401 (DR4Dw4) Epitope Peptides

| SEQ ID NO. | Sequence |
|---|---|
| 2695 | TPVLPHETRLLQTGI |
| 2696 | PLKMLNIPSINVHHY |
| 2697 | FAELEGVWQPAAQPK |
| 2698 | KAVFSRGDTPVLPHE |
| 2699 | VSQYTPDSTPCHRGD |

TABLE 338
HCMV pp65 HLA-DRB1*0701 Epitope Peptides

| SEQ ID NO. | Sequence |
|---|---|
| 2700 | PLKMLNIPSINVHHY |
| 2701 | SAFVFPTKDVALRHV |
| 2702 | ATKMQVIGDQYVKVY |
| 2703 | IPGLSISGNLLMNGQ |
| 2704 | KAVFSRGDTPVLPHE |

TABLE 339
HCMV pp65 HLA-DRB1*1101 Epitope Peptides

| SEQ ID NO. | Sequence |
|---|---|
| 2705 | HPTFTSQYRIQGKLE |
| 2706 | TSAFVFPTKDVALRH |
| 2707 | TSGVMTRGRLKAEST |
| 2708 | NIPSINVHHYPSAAE |
| 2709 | LPVADAVIHASGKQM |

TABLE 340
HCMV pp65 HLA-DRB1*1501 (DR2b) Epitope Peptides

| SEQ ID NO. | Sequence |
|---|---|
| 2710 | TVELRQYDPVAALFF |
| 2711 | LILVSQYTPDSTPCH |
| 2712 | NPAVFTWPPWQAGIL |
| 2713 | PEMISVLGPISGHVL |
| 2714 | QEPMSIYVYALPLKM |

### Human Cytomegalovirus (HCMV) Strain HHV-5 Antigenic Peptides

[0331] In some embodiments, the TVM or VM composition includes Human Cytomegalovirus (HCMV) HHV-5 VIE1 specific T-cells. VIE1 specific T-cells can be generated as described below using one or more antigenic peptides to VIE1. In some embodiments, the VIE1 specific T-cells are generated using one or more antigenic peptides to VIE1, or a modified or heteroclitic peptide derived from a VIE1 peptide. In some embodiments, VIE1 specific T-cells are generated using a VIE1 antigen library comprising a pool of peptides (for example 15mers) containing amino acid overlap (for example 11 amino acids of overlap) between each sequence formed by scanning the protein amino acid sequence SEQ. ID. No. 2715 (UniProt KB—P03169) for HCMV Strain HHV-5 VIE1:

MESSAKRKMDPDNPDEGPSSKVPRPETPVTKATTFLQTMLRKEVNSQLSL
GDPLFPELAEESLKTFERVTEDCNENPEKDVLAELVKQIKVRVDMVRHRI
KEHMLKKYTQTEEKFTGAFNMMGGCLQNALDILDKVHEPFEEMKCIGLTM
QSMYENYIVPEDKREMWMACIKELHDVSKGAANKLGGALQAKARAKKDEL
RRKMMYMCYRNIEFFTKNSAFPKTTNGCSQAMAALQNLPQCSPDEIMAYA
QKIFKILDEERDKVLTHIDHIFMDILTTCVETMCNEYKVTSDACMMTMYG
GISLLSEFCRVLSCYVLEETSVMLAKRPLITKPEVISVMKRRIEEICMKV
FAQYILGADPLRVCSPSVDDLRAIAEESDEEEAIVAYTLATRGASSSDSL
VSPPESPVPATIPLSSVIVAENSDQEESEQSDEEEEEGAQEEREDTVSVK
SEPVSEIEEVAPEEEEDGAEEPTASGGKSTHPMVTRSKADQ

[0332] In some embodiments, the VIE1 specific T-cells are generated using one or more antigenic peptides to VIE1, or a modified or heteroclitic peptide derived from a VIE1 peptide. In some embodiments, the VIE1 specific T-cells are generated with peptides that recognize class I MHC molecules. In some embodiments, the VIE1 specific T-cells are generated with peptides that recognize class II MHC molecules. In some embodiments, the VIE1 specific T-cells are generated with peptides that recognize both class I and class II MHC molecules.

[0333] In some embodiments, the VIE1 peptides used to prime and expand a T-cell subpopulation includes specifically selected HLA-restricted peptides generated by determining the HLA profile of the donor source, and including peptides derived from VIE1 that best match the donor's HLA. In some embodiments, the VIE1 peptides used to prime and expand a T-cell subpopulation are derived from HLA-restricted peptides selected from at least one or more of an HLA-A restricted peptide, HLA-B restricted peptide, or HLA-DR restricted peptide. Suitable methods for generating HLA-restricted peptides from an antigen have been described in, for example, Rammensee, HG., Bachmann, J., Emmerich, N. et al., SYFPEITHI: database for MHC ligands and peptide motifs. Immunogenetics (1999) 50: 213. https://doi.org/10.1007/s002510050595.

[0334] As provided herein, the HLA profile of a donor cell source can be determined, and T-cell subpopulations targeting VIE1 derived, wherein the T-cell subpopulation is primed and expanded using a group of peptides that are HLA-restricted to the donor's HLA profile. In certain embodiments, the T-cell subpopulation is exposed to a peptide mix that includes one or more HLA-A restricted, HLA-B restricted, and HLA-DR restricted peptides. In certain embodiments, the T-cell subpopulation is exposed to a peptide mix that includes HLA-A restricted, HLA-B restricted, and HLA-DR restricted peptides, wherein the HLA-A matched peptides are selected from the peptides of Tables 341-347, the HLA-B peptides are selected from the peptides of Tables 348-354, and the HLA-DR peptides are selected from the peptides of Tables 355-360. For example, if the donor cell source has an HLA profile that is HLA-A*01/*02:01; HLA-B*15:01/*18; and HLA-DRB1*0101/*0301, then the VIE1 peptides used to prime and expand the VIE1 specific T-cell subpopulation are restricted to the specific HLA profile, and may include the peptides identified in Table 341 (Seq. ID. Nos. 2716-2720) for HLA-A*01; Table 342 (Seq. ID. Nos. 2721-2725) for HLA-A*02:01; Table 350 (Seq. ID. Nos. 2761-2765) for HLA-B*15:01; Table 351 (Seq. ID. Nos. 2766-2770) for HLA-B*18; Table 355 (Seq. ID. Nos. 2786-2790) for HLA-DRB1*0101; and Table 356 (Seq. ID. Nos. 2791-2795) for HLA-DRB1*0301. In some embodiments, the mastermix of peptides includes both an overlapping peptide library and specifically selected HLA-restricted peptides generated by determining the HLA profile of the donor source.

[0335] In some embodiments, the HCMV VIE1 HLA-restricted epitopes are specific to at least both of the donor's HLA-A alleles, at least both of the donor's HLA-B alleles, and at least both of the donor's HLA-DR alleles. In some embodiments, the HCMV VIE1 HLA-A alleles are selected from a group comprising HLA-A*01, HLA-A*02:01, HLA-A*03, HLA-A*11:01, HLA-A*24:02, HLA-A*26, or HLA-A*68:01, and the corresponding HCMV VIE1 HLA-restricted peptides are selected for: HLA-A*01 from Table 341; HLA-A*02:01 from Table 342; HLA-A*03 from Table 343; HLA-A*11:01 from Table 344; HLA-A*24:02 from Table 345; HLA-A*26 from Table 346; or HLA-A*68:01 from Table 347; or any combination thereof. In some embodiments, the HCMV VIE1 HLA-B alleles are selected from a group comprising HLA-B*07:02, HLA-B*08, HLA-B*15:01 (B62), HLA-B*18, HLA-B*27:05, HLA-B*35:01, or HLA-B*58:02, and the corresponding HCMV VIE1 HLA-restricted peptides are selected for: HLA-B*07:02 from Table 348; HLA-B*08 from Table 349; HLA-B*15:01 (B62) from Table 350; HLA-B*18 from Table 351; HLA-B*27:05 from Table 352; HLA-B*35:01 from Table 353, or HLA-B*58:02 from Table 354; or any combination thereof. In some embodiments, the HCMV VIE1 HLA-DR alleles are selected from a group comprising HLA-DRB1*0101, HLA-DRB1*0301 (DR17), HLA-DRB1*0401 (DR4Dw4), HLA-DRB1*0701, HLA-DRB1*1101, or HLA-DRB1*1501 (DR2b) and the corresponding HCMV VIE1 HLA-restricted peptides are selected for: HLA-DRB1*0101 from Table 355; HLA-DRB1*0301 (DR17) from Table 356; HLA-DRB1*0401 (DR4Dw4) from Table 357; HLA-DRB1*0701 from Table 358; HLA-DRB1*1101 from Table 359; or HLA-DRB1*1501 (DR2b) from Table 360; or any combination thereof.

TABLE 341
HCMV IE-1 HLA-A*01 Epitope Peptides

| SEQ ID NO. | Sequence |
|---|---|
| 2716 | LSEFCRVLSCY |
| 2717 | ESDEEEAIVAY |
| 2718 | KKDELRRKMMY |
| 2719 | TSDACMMTMY |
| 2720 | IKEHMLKKY |

TABLE 342
HCMV IE-1 HLA-A*02:01 Epitope Peptides

| SEQ ID NO. | Sequence |
|---|---|
| 2721 | SLGDPLFPEL |
| 2722 | LITKPEVISV |
| 2723 | VLAELVKQI |
| 2724 | TMYGGISLL |
| 2725 | ILDEERDKV |

TABLE 343
HCMV IE-1 HLA-A*03 Epitope Peptides

| SEQ ID NO. | Sequence |
|---|---|
| 2726 | ALQAKARAKK |
| 2727 | CIKELHDVSK |
| 2728 | DVSKGAANK |
| 2729 | RIKEHMLKK |
| 2730 | KLGGALQAK |

TABLE 344
HCMV IE-1 HLA-A*11:01 Epitope Peptides

| SEQ ID NO. | Sequence |
|---|---|
| 2731 | TTFLQTMLRK |
| 2732 | STHPMVTRSK |
| 2733 | ATTFLQTMLR |
| 2734 | IMAYAQKIFK |
| 2735 | KSTHPMVTR |

TABLE 345
HCMV IE-1 HLA-A*24:02 Epitope Peptides

| SEQ ID NO. | Sequence |
|---|---|
| 2736 | LFPELAEESL |
| 2737 | MYMCYRNIEF |
| 2738 | AYAQKIFKI |
| 2739 | KYTQTEEKF |
| 2740 | QYILGADPL |

TABLE 346
HCMV IE-1 HLA-A*26 Epitope Peptides

| SEQ ID NO. | Sequence |
|---|---|
| 2741 | ETPVTKATTF |
| 2742 | DVSKGAANKL |
| 2743 | ELAEESLKTF |
| 2744 | EVISVMKRRI |
| 2745 | EVNSQLSLG |

TABLE 347
HCMV IE-1 HLA-A*68:01 Epitope Peptides

| SEQ ID NO. | Sequence |
|---|---|
| 2746 | EAIVAYTLATR |
| 2747 | EIMAYAQKIFK |
| 2748 | ETSVMLAKR |
| 2749 | DVSKGAANK |
| 2750 | EVISVMKRR |

TABLE 348
HCMV IE-1 HLA-B*07:02 Epitope Peptides

| SEQ ID NO. | Sequence |
|---|---|
| 2751 | TPVTKATTFL |
| 2752 | NPEKDVLAEL |
| 2753 | SPVPATIPL |
| 2754 | VPRPETPVT |
| 2755 | RPETPVTKA |

TABLE 349
HCMV IE-1 HLA-B*08 Epitope Peptides

| SEQ ID NO. | Sequence |
|---|---|
| 2756 | KARAKKDEL |
| 2757 | VMKRRIEEI |
| 2758 | SAKRKMDPD |
| 2759 | RHRIKEHML |
| 2760 | ENPEKDVL |

TABLE 350
HCMV IE-1 HLA-B*15:01 (B62) Epitope Peptides

| SEQ ID NO. | Sequence |
|---|---|
| 2761 | ELAEESLKTF |
| 2762 | SQLSLGDPLF |
| 2763 | KVLTHIDHIF |
| 2764 | VLTHIDHIF |
| 2765 | ILDKVHEPF |

TABLE 351
HCMV IE-1 HLA-B*18 Epitope Peptides

| SEQ ID NO. | Sequence |
|---|---|
| 2766 | DEEEAIVAY |
| 2767 | DELRRKMMY |
| 2768 | EEMKCIGL |
| 2769 | EEKFTGAF |
| 2770 | DEERDKVL |

TABLE 352
HCMV IE-1 HLA-B*27:05 Epitope Peptides

| SEQ ID NO. | Sequence |
|---|---|
| 2771 | HRIKEHMLKK |
| 2772 | ARAKKDELRR |
| 2773 | RRIEEICMK |
| 2774 | LRKEVNSQL |
| 2775 | CRVLSCYVL |

TABLE 353
HCMV IE-1 HLA-B*35:01 Epitope Peptides

| SEQ ID NO. | Sequence |
|---|---|
| 2776 | NPEKDVLAEL |
| 2777 | TPVTKATTFL |
| 2778 | VPEDKREMWM |
| 2779 | FPELAEESL |
| 2780 | SPVPATIPL |

TABLE 354
HCMV IE-1 HLA-B*58:02 Epitope Peptides

| SEQ ID NO. | Sequence |
|---|---|
| 2781 | KATTFLQTM |
| 2782 | KTTNGCSQAM |
| 2783 | TSVMLAKRPL |
| 2784 | KARAKKDEL |
| 2785 | KVLTHIDHI |

TABLE 355
HCMV IE-1 HLA-DRB1*0101 Epitope Peptides

| SEQ ID NO. | Sequence |
|---|---|
| 2786 | DHIFMDILTTCVETM |
| 2787 | DACMMTMYGGISLLS |
| 2788 | LSEFCRVLSCYVLEE |
| 2789 | VFAQYILGADPLRVC |
| 2790 | TGAFNMMGGCLQNAL |

TABLE 356
HCMV IE-1 HLA-DRB1*0301 (DR17) Epitope Peptides

| SEQ ID NO. | Sequence |
|---|---|
| 2791 | FERVTEDCNENPEKD |
| 2792 | NYIVPEDKREMWMAC |
| 2793 | FNMMGGCLQNALDIL |
| 2794 | QTMLRKEVNSQLSLG |
| 2795 | MKCIGLTMQSMYENY |

TABLE 357
HCMV IE-1 HLA-DRB1*0401 (DR4Dw4)
Epitope Peptides

| SEQ ID NO. | Sequence |
|---|---|
| 2796 | DHIFMDILTTCVETM |
| 2797 | LSEFCRVLSCYVLEE |
| 2798 | LSCYVLEETSVMLAK |
| 2799 | IVAYTLATRGASSSD |
| 2800 | ETPVTKATTFLQTML |

TABLE 358
HCMV IE-1 HLA-DRB1*0701 Epitope Peptides

| SEQ ID NO. | Sequence |
|---|---|
| 2801 | DHIFMDILTTCVETM |
| 2802 | CNEYKVTSDACMMTM |
| 2803 | LSEFCRVLSCYVLEE |
| 2804 | LSCYVLEETSVMLAK |
| 2805 | DPLFPELAEESLKTF |

TABLE 359
HCMV IE-1 HLA-DRB1*1101 Epitope Peptides

| SEQ ID NO. | Sequence |
|---|---|
| 2806 | IKELHDVSKGAANKL |
| 2807 | IVAYTLATRGASSSD |
| 2808 | KDVLAELVKQIKVRV |
| 2809 | KPEVISVMKRRIEEI |
| 2810 | PEVISVMKRRIEEIC |

TABLE 360
HCMV IE-1 HLA-DRB1*1501 (DR2b)
Epitope Peptides

| SEQ ID NO. | Sequence |
|---|---|
| 2811 | ACMMTMYGGISLLSE |
| 2812 | ISLLSEFCRVLSCYV |
| 2813 | EESLKTFERVTEDCN |
| 2814 | ETPVTKATTFLQTML |
| 2815 | NSQLSLGDPLFPELA |

### Human Adenovirus C Serotype 2 (HAdV-2) (Human Adenovirus 2) Hexon Protein

[0336] In some embodiments, the TVM or VM composition includes Human adenovirus C serotype 2 (HMV-2) Hexon protein CAPSH specific T-cells. CAPSH specific T-cells can be generated as described below using one or more antigenic peptides to CAPSH. In some embodiments, the CAPSH specific T-cells are generated using one or more antigenic peptides to CAPSH, or a modified or heteroclitic peptide derived from a CAPSH peptide. In some embodiments, CAPSH specific T-cells are generated using a CAPSH antigen library comprising a pool of peptides (for example 15mers) containing amino acid overlap (for example 11 amino acids of overlap) between each sequence formed by scanning the protein amino acid sequence SEQ. ID. No. 2816 (UniProt KB—P03277) for Human adenovirus C serotype 2 (HAdV-2) Hexon protein CAPSH:

MATPSMMPQWSYMHISGQDASEYLSPGLVQFARATETYFSLNNKFRNPTV
APTHDVTTDRSQRLTLRFIPVDREDTAYSYKARFTLAVGDNRVLDMASTY
FDIRGVLDRGPTFKPYSGTAYNALAPKGAPNSCEWEQTEDSGRAVAEDEE
EEDEDEEEEEEEQNARDQATKKTHVYAQAPLSGETITKSGLQIGSDNAET
QAKPVYADPSYQPEPQIGESQWNEADANAAGGRVLKKTTPMKPCYGSYAR
PTNPFGGQSVLVPDEKGVPLPKVDLQFFSNTTSLNDRQGNATKPKVVLYS
EDVNMETPDTHLSYKPGKGDENSKAMLGQQSMPNRPNYIAFRDNFIGLMY
YNSTGNMGVLAGQASQLNAVVDLQDRNTELSYQLLLDSIGDRTRYFSMWN
QAVDSYDPDVRIIENHGTEDELPNYCFPLGGIGVTDTYQAIKANGNGSGD
NGDTTWTKDETFATRNEIGVGNNFAMEINLNANLWRNFLYSNIALYLPDK
LKYNPTNVEISDNPNTYDYMNKRVVAPGLVDCYINLGARWSLDYMDNVNP
FNHHRNAGLRYRSMLLGNGRYVPFHIQVPQKFFAIKNLLLLPGSYTYEWN
FRKDVNMVLQSSLGNDLRVDGASIKFDSICLYATFFPMAHNTASTLEAML
RNDTNDQSFNDYLSAANMLYPIPANATNVPISIPSRNWAAFRGWAFTRLK
TKETPSLGSGYDPYYTYSGSIPYLDGTFYLNHTFKKVAITFDSSVSWPGN
DRLLTPNEFEIKRSVDGEGYNVAQCNMTKDWFLVQMLANYNIGYQGFYIP
ESYKDRMYSFFRNFQPMSRQVVDDTKYKEYQQVGILHQHNNSGFVGYLAP
TMREGQAYPANVPYPLIGKTAVDSITQKKFLCDRTLWRIPFSSNFMSMGA
LTDLGQNLLYANSAHALDMTFEVDPMDEPTLLYVLFEVFDVVRVHQPHRG
VIETVYLRTPFSAGNATT

[0337] In some embodiments, the CAPSH specific T-cells are generated using one or more antigenic peptides to CAPSH, or a modified or heteroclitic peptide derived from a CAPSH peptide. In some embodiments, the CAPSH specific T-cells are generated with peptides that recognize class I MHC molecules. In some embodiments, the CAPSH specific T-cells are generated with peptides that recognize class II MHC molecules. In some embodiments, the CAPSH specific T-cells are generated with peptides that recognize both class I and class II MHC molecules.

[0338] In some embodiments, the CAPSH peptides used to prime and expand a T-cell subpopulation includes specifically selected HLA-restricted peptides generated by determining the HLA profile of the donor source, and including peptides derived from CAPSH that best match the donor's HLA. In some embodiments, the CAPSH peptides used to prime and expand a T-cell subpopulation are derived from HLA-restricted peptides selected from at least one or more of an HLA-A restricted peptide, HLA-B restricted peptide, or HLA-DR restricted peptide. Suitable methods for generating HLA-restricted peptides from an antigen have been described in, for example, Rammensee, HG., Bachmann, J., Emmerich, N. et al., SYFPEITHI: database for MHC ligands and peptide motifs. Immunogenetics (1999) 50: 213. https://doi.org/10.1007/s002510050595.

[0339] As provided herein, the HLA profile of a donor cell source can be determined, and T-cell subpopulations targeting CAPSH derived, wherein the T-cell subpopulation is primed and expanded using a group of peptides that are HLA-restricted to the donor's HLA profile. In certain embodiments, the T-cell subpopulation is exposed to a peptide mix that includes one or more HLA-A restricted, HLA-B restricted, and HLA-DR restricted peptides. In certain embodiments, the T-cell subpopulation is exposed to a peptide mix that includes HLA-A restricted, HLA-B restricted, and HLA-DR restricted peptides, wherein the HLA-A matched peptides are selected from the peptides of Tables 361-367, the HLA-B peptides are selected from the peptides of Tables 368-374, and the HLA-DR peptides are selected from the peptides of Tables 375-380. For example, if the donor cell source has an HLA profile that is HLA-A*01/*02:01; HLA-B*15:01/*18; and HLA-DRB1*0101/*0301, then the CAPSH peptides used to prime and expand the CAPSH specific T-cell subpopulation are restricted to the specific HLA profile, and may include the peptides identified in Table 361 (Seq. ID. Nos. 2817-2821) for HLA-A*01; Table 362 (Seq. ID. Nos. 2822-2826) for HLA-A*02:01; Table 370 (Seq. ID. Nos. 2862-2866) for HLA-B*15:01; Table 371 (Seq. ID. Nos. 2867-2871) for HLA-B*18; Table 375 (Seq. ID. Nos. 2887-2891) for HLA-DRB1*0101; and Table 376 (Seq. ID. Nos. 2892-2896) for HLA-DRB1*0301. In some embodiments, the mastermix of peptides includes both an overlapping peptide library and specifically selected HLA-restricted peptides generated by determining the HLA profile of the donor source.

[0340] In some embodiments, the HAdV-2 Hexon protein HLA-restricted epitopes are specific to at least both of the donor's HLA-A alleles, at least both of the donor's HLA-B alleles, and at least both of the donor's HLA-DR alleles. In some embodiments, the HAdV-2 Hexon protein HLA-A alleles are selected from a group comprising HLA-A*01, HLA-A*02:01, HLA-A*03, HLA-A*11:01, HLA-A*24:02, HLA-A*26, or HLA-A*68:01, and the corresponding HAdV-2 Hexon protein HLA-restricted peptides are selected for: HLA-A*01 from Table 361; HLA-A*02:01 from Table 362; HLA-A*03 from Table 363; HLA-A*11:01 from Table 364; HLA-A*24:02 from Table 365; HLA-A*26 from Table 366; or HLA-A*68:01 from Table 367; or any combination thereof. In some embodiments, the HAdV-2 Hexon protein HLA-B alleles are selected from a group comprising HLA-B*07:02, HLA-B*08, HLA-B*15:01 (B62), HLA-B*18, HLA-B*27:05, HLA-B*35:01, or HLA-B*58:02, and the corresponding HAdV-2 Hexon protein HLA-restricted peptides are selected for: HLA-B*07:02 from Table 368; HLA-B*08 from Table 369; HLA-B*15:01 (B62) from Table 370; HLA-B*18 from Table 371; HLA-B*27:05 from Table 372; HLA-B*35:01 from Table 373, or HLA-B*58:02 from Table 374; or any combination thereof. In some embodiments, the HAdV-2 Hexon protein HLA-DR alleles are selected from a group comprising HLA-DRB1*0101, HLA-DRB1*0301 (DR17), HLA-DRB1*0401 (DR4Dw4), HLA-DRB1*0701, HLA-DRB1*1101, or HLA-DRB1*1501 (DR2b) and the corresponding HAdV-2 Hexon protein HLA-restricted peptides are selected for: HLA-DRB1*0101 from Table 375; HLA-DRB1*0301 (DR17) from Table 376; HLA-DRB1*0401 (DR4Dw4) from Table 377; HLA-DRB1*0701 from Table 378; HLA-DRB1*1101 from Table 379; or HLA-DRB1*1501 (DR2b) from Table 380; or any combination thereof.

TABLE 361
HADV HEXON HLA-A*01 Epitope Peptides

| SEQ ID NO. | Sequence |
|---|---|
| 2817 | LLDSIGDRTRY |
| 2818 | ISDNPNTYDY |
| 2819 | PMDEPTLLY |
| 2820 | LQDRNTELSY |
| 2821 | GTEDELPNY |

TABLE 362
HADV HEXON HLA-A*02:01 Epitope Peptides

| SEQ ID NO. | Sequence |
|---|---|
| 2822 | LLYANSAHAL |
| 2823 | TLLYVLFEV |
| 2824 | TLAVGDNRV |
| 2825 | VLAGQASQL |
| 2826 | MLLGNGRYV |

TABLE 363
HADV HEXON HLA-A*03 Epitope Peptides

| SEQ ID NO. | Sequence |
|---|---|
| 2827 | DLRVDGASIK |
| 2828 | RVLKKTTPMK |
| 2829 | RVLDMASTY |
| 2830 | ALYLPDKLK |
| 2831 | VLDRGPTFK |

TABLE 364
HADV HEXON HLA-A*11:01 Epitope Peptides

| SEQ ID NO. | Sequence |
|---|---|
| 2832 | GVLDRGPTFK |
| 2833 | GVTDTYQAIK |
| 2834 | GVIETVYLR |
| 2835 | ASTLEAMLR |
| 2836 | NVPYPLIGK |

TABLE 365
HADV HEXON HLA-A*24:02 Epitope Peptides

| SEQ ID NO. | Sequence |
|---|---|
| 2837 | AYPANVPYPL |
| 2838 | EYLSPGLVQF |
| 2839 | PYLDGTFYL |
| 2840 | TYFSLNNKF |
| 2841 | TYFDIRGVL |

TABLE 366
HADV HEXON HLA-A*26 Epitope Peptides

| SEQ ID NO. | Sequence |
|---|---|
| 2842 | EVDPMDEPTL |
| 2843 | ETPSLGSGY |
| 2844 | ETPDTHLSY |
| 2845 | ETVYLRTPF |
| 2846 | EVFDVVRVH |

TABLE 367
HADV HEXON HLA-A*68:01 Epitope Peptides

| SEQ ID NO. | Sequence |
|---|---|
| 2847 | TAVDSITQK |
| 2848 | ETYFSLNNK |
| 2849 | NVPYPLIGK |
| 2850 | LTPNEFEIKR |
| 2851 | DVVRVHQPHR |

TABLE 368
HADV HEXON HLA-B*07:02 Epitope Peptides

| SEQ ID NO. | Sequence |
|---|---|
| 2852 | IPYLDGTFYL |
| 2853 | VPDEKGVPL |
| 2854 | NPFGGQSVL |
| 2855 | YPANVPYPL |
| 2856 | DPMDEPTLL |

TABLE 369
HADV HEXON HLA-B*08 Epitope Peptides

| SEQ ID NO. | Sequence |
|---|---|
| 2857 | GLRYRSMLL |
| 2858 | VPDEKGVPL |
| 2859 | GLRYRSML |
| 2860 | SYKARFTL |
| 2861 | ATKPKVVL |

TABLE 370
HADV HEXON HLA-B*15:01 (B62) Epitope Peptides

| SEQ ID NO. | Sequence |
|---|---|
| 2862 | LLLLPGSYTY |
| 2863 | YQGFYIPESY |
| 2864 | VQFARATETY |
| 2865 | ALYLPDKLKY |
| 2866 | RQVVDDTKY |

TABLE 371
HADV HEXON HLA-B*18 Epitope Peptides

| SEQ ID NO. | Sequence |
|---|---|
| 2867 | DEPTLLYVL |
| 2868 | AETQAKPVY |
| 2869 | DELPNYCF |
| 2870 | DENSKAML |
| 2871 | TEDELPNY |

TABLE 372
HADV HEXON HLA-B*27:05 Epitope Peptides

| SEQ ID NO. | Sequence |
|---|---|
| 2872 | DRSQRLTLRF |
| 2873 | GRVLKKTTPM |
| 2874 | LRVDGASIKF |
| 2875 | WRIPFSSNF |
| 2876 | DRLLTPNEF |

TABLE 373
HADV HEXON HLA-B*35:01 Epitope Peptides

| SEQ ID NO. | Sequence |
|---|---|
| 2877 | IPVDREDTAY |
| 2878 | MPNRPNYIAF |
| 2879 | IPESYKDRMY |
| 2880 | DPMDEPTLLY |
| 2881 | VPDEKGVPL |

TABLE 374
HADV HEXON HLA-B*58:02 Epitope Peptides

| SEQ ID NO. | Sequence |
|---|---|
| 2882 | RSQRLTLRFI |
| 2883 | VSWPGNDRLL |
| 2884 | DSIGDRTRYF |
| 2885 | DSYDPDVRII |
| 2886 | KTTPMKPCY |

TABLE 375
HADV HEXON HLA-DRB1*0101 Epitope Peptides

| SEQ ID NO. | Sequence |
|---|---|
| 2887 | GTAYNALAPKGAPNS |
| 2888 | VDCYINLGARWSLDY |
| 2889 | YVPFHIQVPQKFFAI |
| 2890 | QWSYMHISGQDASEY |
| 2891 | TGNMGVLAGQASQLN |

TABLE 376
HADV HEXON HLA-DRB1*0301 (DR17) Epitope Peptides

| SEQ ID NO. | Sequence |
|---|---|
| 2892 | EWNFRKDVNMVLQSS |
| 2893 | GASIKFDSICLYATF |
| 2894 | THDVTTDRSQRLTLR |
| 2895 | QSVLVPDEKGVPLPK |
| 2896 | GRAVAEDEEEEDEDE |

TABLE 377
HADV HEXON HLA-DRB1*0401 (DR4Dw4) Epitope Peptides

| SEQ ID NO. | Sequence |
|---|---|
| 2897 | TLRFIPVDREDTAYS |
| 2898 | VVLYSEDVNMETPDT |
| 2899 | DTTWTKDETFATRNE |
| 2900 | GNNFAMEINLNANLW |
| 2901 | PQKFFAIKNLLLLPG |

TABLE 378
HADV HEXON HLA-DRB1*0701 Epitope Peptides

| SEQ ID NO. | Sequence |
|---|---|
| 2902 | LMYYNSTGNMGVLAG |
| 2903 | PQKFFAIKNLLLLPG |
| 2904 | DPYYTYSGSIPYLDG |
| 2905 | FKKVAITFDSSVSWP |
| 2906 | LVQFARATETYFSLN |

TABLE 379
HADV HEXON HLA-DRB1*1101 Epitope Peptides

| SEQ ID NO. | Sequence |
|---|---|
| 2907 | YATFFPMAHNTASTL |
| 2908 | PNTYDYMNKRVVAPG |
| 2909 | FRNFQPMSRQVVDDT |
| 2910 | TLRFIPVDREDTAYS |
| 2911 | NVPYPLIGKTAVDSI |

TABLE 380
HADV HEXON HLA-DRB1*1501 (DR2b) Epitope Peptides

| SEQ ID NO. | Sequence |
|---|---|
| 2912 | PGLVDCYINLGARWS |
| 2913 | FDSICLYATFFPMAH |
| 2914 | YSFFRNFQPMSRQVV |
| 2915 | PSMMPQWSYMHISGQ |
| 2916 | KVDLQFFSNTTSLND |

### Human Adenovirus Serotype 2 (HAdV-2) (Human Adenovirus 2) Penton Protein

[0341] In some embodiments, the TVM or VM composition includes Human adenovirus C serotype 2 (HAAT-2) Penton protein CAPSP specific T-cells. CAPSP specific T-cells can be generated as described below using one or more antigenic peptides to CAPSP. In some embodiments, the CAPSP specific T-cells are generated using one or more antigenic peptides to CAPSP, or a modified or heteroclitic peptide derived from a CAPSP peptide. In some embodiments, CAPSP specific T-cells are generated using a CAPSP antigen library comprising a pool of peptides (for example 15mers) containing amino acid overlap (for example 11 amino acids of overlap) between each sequence formed by scanning the protein amino acid sequence SEQ. ID. No. 2917 (UniProt KB—P03276) for Human adenovirus C serotype 2 (HAdV-2) Penton protein CAPSP:

MQRAAMYEEGPPPSYESVVSAAPVAAALGSPFDAPLDPPFVPPRYLRPT
GGRNSIRYSELAPLFDTTRVYLVDNKSTDVASLNYQNDHSNFLTTVIQN
NDYSPGEASTQTINLDDRSHWGGDLKTILHTNMPNVNEFMFTNKFKARV
MVSRSLTKDKQVELKYEWVEFTLPEGNYSETMTIDLMNNAIVEHYLKVG
RQNGVLESDIGVKFDTRNFRLGFDPVTGLVMPGVYTNEAFHPDIILLPG
CGVDFTHSRLSNLLGIRKRQPFQEGFRITYDDLEGGNIPALLDVDAYQA
SLKDDTEQGGDGAGGGNNSGSGAEENSNAAAAAMQPVEDMNDHAIRGDT
FATRAEEKRAEAEAAAEAAAPAAQPEVEKPQKKPVIKPLTEDSKKRSYN
LISNDSTFTQYRSWYLAYNYGDPQTGIRSWTLLCTPDVTCGSEQVYWSL
PDMMQDPVTFRSTSQISNFPVVGAELLPVHSKSFYNDQAVYSQLIRQFT
SLTHVFNRFPENQILARPPAPTITTVSENVPALTDHGTLPLRNSIGGVQ
RVTITDARRRTCPYVYKALGIVSPRVLSSRTF

[0342] In some embodiments, the CAPSP specific T-cells are generated using one or more antigenic peptides to CAPSP, or a modified or heteroclitic peptide derived from a CAPSP peptide. In some embodiments, the CAPSP specific T-cells are generated with peptides that recognize class I MHC molecules. In some embodiments, the CAPSP specific T-cells are generated with peptides that recognize class II MHC molecules. In some embodiments, the CAPSP specific T-cells are generated with peptides that recognize both class I and class II MHC molecules.

[0343] In some embodiments, the CAPSP peptides used to prime and expand a T-cell subpopulation includes specifically selected HLA-restricted peptides generated by determining the HLA profile of the donor source, and including peptides derived from CAPSP that best match the donor's HLA. In some embodiments, the CAPSP peptides used to prime and expand a T-cell subpopulation are derived from HLA-restricted peptides selected from at least one or more of an HLA-A restricted peptide, HLA-B restricted peptide, or HLA-DR restricted peptide. Suitable methods for generating HLA-restricted peptides from an antigen have been described in, for example, Rammensee, HG., Bachmann, J., Emmerich, N. et al., SYFPEITHI: database for MHC ligands and peptide motifs. Immunogenetics (1999) 50: 213. https://doi.org/10.1007/s002510050595.

[0344] As provided herein, the HLA profile of a donor cell source can be determined, and T-cell subpopulations targeting CAPSP derived, wherein the T-cell subpopulation is primed and expanded using a group of peptides that are HLA-restricted to the donor's HLA profile. In certain embodiments, the T-cell subpopulation is exposed to a peptide mix that includes one or more HLA-A restricted, HLA-B restricted, and HLA-DR restricted peptides. In certain embodiments, the T-cell subpopulation is exposed to a peptide mix that includes HLA-A restricted, HLA-B restricted, and HLA-DR restricted peptides, wherein the HLA-A matched peptides are selected from the peptides of Tables 381-387, the HLA-B peptides are selected from the peptides of Tables 388-394, and the HLA-DR peptides are selected from the peptides of Tables 395-400. For example, if the donor cell source has an HLA profile that is HLA-A*01/*02:01; HLA-B*15:01/*18; and HLA-DRB1*0101/*0301, then the CAPSP peptides used to prime and expand the CAPSP specific T-cell subpopulation are restricted to the specific HLA profile, and may include the peptides identified in Table 381 (Seq. ID. Nos. 2918-2922) for HLA-A*01; Table 382 (Seq. ID. Nos. 2923-2927) for HLA-A*02:01; Table 390 (Seq. ID. Nos. 2963-2967) for HLA-B*15:01; Table 391 (Seq. ID. Nos. 2968-2972) for HLA-B*18; Table 395 (Seq. ID. Nos. 2988-2992) for HLA-DRB1*0101; and Table 396 (Seq. ID. Nos. 2993-2997) for HLA-DRB1*0301. In some embodiments, the mastermix of peptides includes both an overlapping peptide library and specifically selected HLA-restricted peptides generated by determining the HLA profile of the donor source.

[0345] In some embodiments, the HAdV-2 Penton protein HLA-restricted epitopes are specific to at least both of the donor's HLA-A alleles, at least both of the donor's HLA-B alleles, and at least both of the donor's HLA-DR alleles. In some embodiments, the HAdV-2 Penton protein HLA-A alleles are selected from a group comprising HLA-A*01, HLA-A*02:01, HLA-A*03, HLA-A*11:01, HLA-A*24:02, HLA-A*26, or HLA-A*68:01, and the corresponding HAdV-2 Penton protein HLA-restricted peptides are selected for: HLA-A*01 from Table 381; HLA-A*02:01 from Table 382; HLA-A*03 from Table 383; HLA-A*11:01 from Table 384; HLA-A*24:02 from Table 385; HLA-A*26 from Table 386; or HLA-A*68:01 from Table 387; or any combination thereof. In some embodiments, the HAdV-2 Penton protein HLA-B alleles are selected from a group comprising HLA-B*07:02, HLA-B*08, HLA-B*15:01 (B62), HLA-B*18, HLA-B*27:05, HLA-B*35:01, or HLA-B*58:02, and the corresponding HAdV-2 Penton protein HLA-restricted peptides are selected for: HLA-B*07:02 from Table 388; HLA-B*08 from Table 389; HLA-B*15:01 (B62) from Table 390; HLA-B*18 from Table 391; HLA-B*27:05 from Table 392; HLA-B*35:01 from Table 393, or HLA-B*58:02 from Table 394; or any combination thereof. In some embodiments, the HAdV-2 Penton protein HLA-DR alleles are selected from a group comprising HLA-DRB1*0101, HLA-DRB1*0301 (DR17), HLA-DRB1*0401 (DR4Dw4), HLA-DRB1*0701, HLA-DRB1*1101, or HLA-DRB1*1501 (DR2b) and the corresponding HAdV-2 Penton protein HLA-restricted peptides are selected for: HLA-DRB1*0101 from Table 395; HLA-DRB1*0301 (DR17) from Table 396; HLA-DRB1*0401 (DR4Dw4) from Table 397; HLA-DRB1*0701 from Table 398; HLA-DRB1*1101 from Table 399; or HLA-DRB1*1501 (DR2b) from Table 400; or any combination thereof.

TABLE 381
HADV PENTON HLA-A*01 Epitope Peptides

| SEQ ID NO. | Sequence |
|---|---|
| 2918 | ITDARRRTCPY |
| 2919 | PLDPPFVPPRY |
| 2920 | STDVASLNY |
| 2921 | TKDKQVELKY |
| 2922 | LTEDSKKRSY |

TABLE 382
HADV PENTON HLA-A*02:01 Epitope Peptides

| SEQ ID NO. | Sequence |
|---|---|
| 2923 | DLEGGNIPAL |
| 2924 | SIRYSELAPL |
| 2925 | SLTKDKQVEL |
| 2926 | ILARPPAPTI |
| 2927 | AIVEHYLKV |

TABLE 383
HADV PENTON HLA-A*03 Epitope Peptides

| SEQ ID NO. | Sequence |
|---|---|
| 2928 | RVMVSRSLTK |
| 2929 | GVLESDIGVK |
| 2930 | ILLPGCGVDF |
| 2931 | RLSNLLGIRK |
| 2932 | DVDAYQASLK |

TABLE 384
HADV PENTON HLA-A*11:01 Epitope Peptides

| SEQ ID NO. | Sequence |
|---|---|
| 2933 | GVLESDIGVK |
| 2934 | RVMVSRSLTK |
| 2935 | LTKDKQVELK |
| 2936 | DVDAYQASLK |
| 2937 | DTFATRAEEK |

TABLE 385
HADV PENTON HLA-A*24:02 Epitope Peptides

| SEQ ID NO. | Sequence |
|---|---|
| 2938 | NYSETMTIDL |
| 2939 | TYDDLEGGNI |
| 2940 | RYSELAPLF |
| 2941 | KYEWVEFTL |
| 2942 | VYSQLIRQF |

TABLE 386
HADV PENTON HLA-A*26 Epitope Peptides

| SEQ ID NO. | Sequence |
|---|---|
| 2943 | DVTCGSEQVY |
| 2944 | EAFHPDIILL |
| 2945 | TTVSENVPAL |
| 2946 | DVDAYQASL |
| 2947 | TVSENVPAL |

TABLE 387
HADV PENTON HLA-A*68:01 Epitope Peptides

| SEQ ID NO. | Sequence |
|---|---|
| 2948 | DTFATRAEEKR |
| 2949 | PVEDMNDHAIR |
| 2950 | ELAPLFDTTR |
| 2951 | IVEHYLKVGR |
| 2952 | RVTITDARR |

TABLE 388
HADV PENTON HLA-B*07:02 Epitope Peptides

| SEQ ID NO. | Sequence |
|---|---|
| 2953 | PPSYESVVSA |
| 2954 | VPALTDHGTL |
| 2955 | DPPFVPPRYL |
| 2956 | PPFVPPRYL |
| 2957 | RPPAPTITT |

TABLE 389
HADV PENTON HLA-B*08 Epitope Peptides

| SEQ ID NO. | Sequence |
|---|---|
| 2958 | LTKDKQVEL |
| 2959 | DSKKRSYNL |
| 2960 | ELKYEWVEF |
| 2961 | QKKPVIKPL |
| 2962 | GIRKRQPF |

TABLE 390
HADV PENTON HLA-B*15:01 (B62) Epitope Peptides

| SEQ ID NO. | Sequence |
|---|---|
| 2963 | ILLPGCGVDF |
| 2964 | RQFTSLTHVF |
| 2965 | TQYRSWYLAY |
| 2966 | VLESDIGVKF |
| 2967 | PLFDTTRVY |

TABLE 391
HADV PENTON HLA-B*18 Epitope Peptides

| SEQ ID NO. | Sequence |
|---|---|
| 2968 | NEFMFTNKF |
| 2969 | LESDIGVKF |
| 2970 | TEDSKKRSY |
| 2971 | EEGPPPSY |
| 2972 | QEGFRITY |

TABLE 392
HADV PENTON HLA-B*27:05 Epitope Peptides

| SEQ ID NO. | Sequence |
|---|---|
| 2973 | FRSTSQISNF |
| 2974 | GRNSIRYSEL |
| 2975 | IRYSELAPLF |
| 2976 | QRVTITDARR |
| 2977 | RRTCPYVYK |

TABLE 393
HADV PENTON HLA-B*35:01 Epitope Peptides

| SEQ ID NO. | Sequence |
|---|---|
| 2978 | APLFDTTRVY |
| 2979 | IPALLDVDAY |
| 2980 | VPALTDHGTL |
| 2981 | FPVVGAELL |
| 2982 | LPVHSKSFY |

TABLE 394
HADV PENTON HLA-B*58:02 Epitope Peptides

| SEQ ID NO. | Sequence |
|---|---|
| 2983 | KARVMVSRSL |
| 2984 | KSTDVASLNY |
| 2985 | KSFYNDQAVY |
| 2986 | RSWYLAYNY |
| 2987 | RSTSQISNF |

TABLE 395
HADV PENTON HLA-DRB1*0101 Epitope Peptides

| SEQ ID NO. | Sequence |
|---|---|
| 2988 | HPDIILLPGCGVDFT |
| 2989 | RITYDDLEGGNIPAL |
| 2990 | IRSWTLLCTPDVTCG |
| 2991 | ISNFPVVGAELLPVH |
| 2992 | RLGFDPVTGLVMPGV |

TABLE 396
HADV PENTON HLA-DRB1*0301 (DR17) Epitope Peptides

| SEQ ID NO. | Sequence |
|---|---|
| 2993 | SRSLTKDKQVELKYE |
| 2994 | NGVLESDIGVKFDTR |
| 2995 | NFRLGFDPVTGLVMP |
| 2996 | IKPLTEDSKKRSYNL |
| 2997 | DIGVKFDTRNFRLGF |

TABLE 397
HADV PENTON HLA-DRB1*0401 (DR4Dw4) Epitope
Peptides

| SEQ ID NO. | Sequence |
|---|---|
| 2998 | SLNYQNDHSNFLTTV |
| 2999 | KRSYNLISNDSTFTQ |
| 3000 | IRSWTLLCTPDVTCG |
| 3001 | QAVYSQLIRQFTSLT |
| 3002 | IRQFTSLTHVFNRFP |

TABLE 398
HADV PENTON HLA-DRB1*0701 Epitope Peptides

| SEQ ID NO. | Sequence |
|---|---|
| 3003 | EGNYSETMTIDLMNN |
| 3004 | APLFDTTRVYLVDNK |
| 3005 | SLNYQNDHSNFLTTV |
| 3006 | DSTFTQYRSWYLAYN |
| 3007 | IRSWTLLCTPDVTCG |

TABLE 399
HADV PENTON HLA-DRB1*1101 Epitope Peptides

| SEQ ID NO. | Sequence |
|---|---|
| 3008 | VEHYLKVGRQNGVLE |
| 3009 | LSNLLGIRKRQPFQE |
| 3010 | IRQFTSLTHVFNRFP |
| 3011 | VNEFMFTNKFKARVM |
| 3012 | PPSYESVVSAAPVAA |

TABLE 400
HADV PENTON HLA-DRB1*1501 (DR2b) Epitope Peptides

| SEQ ID NO. | Sequence |
|---|---|
| 3013 | SQLIRQFTSLTHVFN |
| 3014 | NAIVEHYLKVGRQNG |
| 3015 | QTGIRSWTLLCTPDV |
| 3016 | TSQISNFPVVGAELL |
| 3017 | LLDVDAYQASLKDDT |

### BK Polyomavirus (BKPyV) (Human Polyomavirus 1) Large T Antigen

[0346] In some embodiments, the TVM or VM composition includes BK polyomavirus (BKPyV) (Human polyomavirus 1) Large T Antigen LT specific T-cells. LT specific T-cells can be generated as described below using one or more antigenic peptides to LT. In some embodiments, the LT specific T-cells are generated using one or more antigenic peptides to LT, or a modified or heteroclitic peptide derived from a LT peptide. In some embodiments, LT specific T-cells are generated using a LT antigen library comprising a pool of peptides (for example 15mers) containing amino acid overlap (for example 11 amino acids of overlap) between each sequence formed by scanning the protein amino acid sequence SEQ. ID. No. 3018 (UniProt KB—P03071) for BK polyomavirus (BKPyV) (Human polyomavirus 1) Large T Antigen LT:

MDKVLNREESMELMDLLGLERAAWGNLPLMRKAYLRKCKEFHPDKGGDED
KMKRMNTLYKKMEQDVKVAHQPDFGTWSSSEVPTYGTEEWESWWSSFNEK
WDEDLFCHEDMFASDEEATADSQHSTPPKKKRKVEDPKDFPSDLHQFLSQ
AVFSNRTLACFAVYTTKEKAQILYKKLMEKYSVTFISRHMCAGHNIIFFL
TPHRHRVSAINNFCQKLCTFSFLICKGVNKEYLLYSALTRDPYHTIEESI
QGGLKEHDFSPEEPEETKQVSWKLITEYAVETKCEDVFLLLGMYLEFQYN
VEECKKCQKKDQPYHFKYHEKHFANAIIFAESKNQKSICQQAVDTVLAKK
RVDTLHMTREEMLTERFNHILDKMDLIFGAHGNAVLEQYMAGVAWLHCLL
PKMDSVIFDFLHCIVFNVPKRRYWLFKGPIDSGKTTLAAGLLDLCGGKAL
NVNLPMERLTFELGVAIDQYMVVFEDVKGTGAESKDLPSGHGINNLDSLR
DYLDGSVKVNLEKKHLNKRTQIFPPGLVTMNEYPVPKTLQARFVRQIDFR
PKIYLRKSLQNSEFLLEKRILQSGMTLLLLLIWFRPVADFATDIQSRIVE
WKERLDSEISMYTFSRMKYNICMGKCILDITREEDSETEDSGHGSSTESQ
SQCSSQVSDTSAPAEDSQRSDPHSQELHLCKGFQCFKRPKTPPPK

[0347] In some embodiments, the LT specific T-cells are generated using one or more antigenic peptides to LT, or a modified or heteroclitic peptide derived from a LT peptide. In some embodiments, the LT specific T-cells are generated with peptides that recognize class I MHC molecules. In some embodiments, the LT specific T-cells are generated with peptides that recognize class II MHC molecules. In some embodiments, the LT specific T-cells are generated with peptides that recognize both class I and class II MHC molecules.

[0348] In some embodiments, the LT peptides used to prime and expand a T-cell subpopulation includes specifically selected HLA-restricted peptides generated by determining the HLA profile of the donor source, and including peptides derived from LT that best match the donor's HLA. In some embodiments, the LT peptides used to prime and expand a T-cell subpopulation are derived from HLA-restricted peptides selected from at least one or more of an HLA-A restricted peptide, HLA-B restricted peptide, or HLA-DR restricted peptide. Suitable methods for generating HLA-restricted peptides from an antigen have been described in, for example, Rammensee, HG., Bachmann, J., Emmerich, N. et al., SYFPEITHI: database for MHC ligands and peptide motifs. Immunogenetics (1999) 50: 213. https://doi.org/10.1007/s002510050595.

[0349] As provided herein, the HLA profile of a donor cell source can be determined, and T-cell subpopulations targeting LT derived, wherein the T-cell subpopulation is primed and expanded using a group of peptides that are HLA-restricted to the donor's HLA profile. In certain embodiments, the T-cell subpopulation is exposed to a peptide mix that includes one or more HLA-A restricted, HLA-B restricted, and HLA-DR restricted peptides. In certain embodiments, the T-cell subpopulation is exposed to a peptide mix that includes HLA-A restricted, HLA-B restricted, and HLA-DR restricted peptides, wherein the HLA-A matched peptides are selected from the peptides of Tables 401-407, the HLA-B peptides are selected from the peptides of Tables 408-414, and the HLA-DR peptides are selected from the peptides of Tables 415-420. For example, if the donor cell source has an HLA profile that is HLA-A*01/*02:01; HLA-B*15:01/*18; and HLA-DRB1*0101/*0301, then the LT peptides used to prime and expand the LT specific T-cell subpopulation are restricted to the specific HLA profile, and may include the peptides identified in Table 401 (Seq. ID. Nos. 3019-3023) for HLA-A*01; Table 402 (Seq. ID. Nos. 3024-3028) for HLA-A*02:01; Table 410 (Seq. ID. Nos. 3064-3068) for HLA-B*15:01; Table 411 (Seq. ID. Nos. 3069-3073) for HLA-B*18; Table 415 (Seq. ID. Nos. 3089-3093) for HLA-DRB1*0101; and Table 416 (Seq. ID. Nos. 3094-3098) for HLA-DRB1*0301. In some embodiments, the mastermix of peptides includes both an overlapping peptide library and specifically selected HLA-restricted peptides generated by determining the HLA profile of the donor source.

[0350] In some embodiments, the BKPyV HLA-restricted epitopes are specific to at least both of the donor's HLA-A alleles, at least both of the donor's HLA-B alleles, and at least both of the donor's HLA-DR alleles. In some embodiments, the BKPyV HLA-A alleles are selected from a group comprising HLA-A*01, HLA-A*02:01, HLA-A*03, HLA-A*11:01, HLA-A*24:02, HLA-A*26, or HLA-A*68:01, and the corresponding BKPyV HLA-restricted peptides are selected for: HLA-A*01 from Table 401; HLA-A*02:01 from Table 402; HLA-A*03 from Table 403; HLA-A*11:01 from Table 404; HLA-A*24:02 from Table 405; HLA-A*26 from Table 406; or HLA-A*68:01 from Table 407; or any combination thereof. In some embodiments, the BKPyV HLA-B alleles are selected from a group comprising HLA-B*07:02, HLA-B*08, HLA-B*15:01 (B62), HLA-B*18, HLA-B*27:05, HLA-B*35:01, or HLA-B*58:02, and the corresponding BKPyV HLA-restricted peptides are selected for: HLA-B*07:02 from Table 408; HLA-B*08 from Table 409; HLA-B*15:01 (B62) from Table 410; HLA-B*18 from Table 411; HLA-B*27:05 from Table 412; HLA-B*35:01 from Table 413, or HLA-B*58:02 from Table 414; or any combination thereof. In some embodiments, the BKPyV HLA-DR alleles are selected from a group comprising HLA-DRB1*0101, HLA-DRB1*0301 (DR17), HLA-DRB1*0401 (DR4Dw4), HLA-DRB1*0701, HLA-DRB1*1101, or HLA-DRB1*1501 (DR2b) and the corresponding BKPyV HLA-restricted peptides are selected for: HLA-DRB1*0101 from Table 415; HLA-DRB1*0301 (DR17) from Table 416; HLA-DRB1*0401 (DR4Dw4) from Table 417; HLA-DRB1*0701 from Table 418; HLA-DRB1*1101 from Table 419; or HLA-DRB1*1501 (DR2b) from Table 420; or any combination thereof.

TABLE 401
BKPYV LARGE T ANTIGEN HLA-A*01 Epitope Peptides

| SEQ ID NO. | Sequence |
|---|---|
| 3019 | CEDVFLLLGMY |
| 3020 | YTTKEKAQILY |
| 3021 | KKDQPYHFKY |
| 3022 | RLDSEISMY |
| 3023 | QIDFRPKIY |

TABLE 402
BKPYV LARGE T ANTIGEN HLA-A*02:01 Epitope Peptides

| SEQ ID NO. | Sequence |
|---|---|
| 3024 | VLAKKRVDTL |
| 3025 | SICQQAVDTV |
| 3026 | YLDGSVKVNL |
| 3027 | TLAAGLLDL |
| 3028 | CLLPKMDSV |

TABLE 403
BKPYV LARGE T ANTIGEN HLA-A*03 Epitope Peptides

| SEQ ID NO. | Sequence |
|---|---|
| 3029 | DVGTGAESK |
| 3030 | FLICKGVNK |
| 3031 | RDYLDGSVK |
| 3032 | ILYKKLMEK |
| 3033 | AVDTVLAKK |

TABLE 404
BKPYV LARGE T ANTIGEN HLA-A*11:01 Epitope Peptides

| SEQ ID NO. | Sequence |
|---|---|
| 3034 | VTMNEYPVPK |
| 3035 | GSVKVNLEK |
| 3036 | CTFSFLICK |
| 3037 | STPPKKKRK |
| 3038 | AVDTVLAKK |

TABLE 405
BKPYV LARGE T ANTIGEN HLA-A*24:02 Epitope Peptides

| SEQ ID NO. | Sequence |
|---|---|
| 3039 | VYTTKEKAQI |
| 3040 | KYNICMGKCI |
| 3041 | AYLRKCKEF |
| 3042 | PYHTIEESI |
| 3043 | QYMAGVAWL |

TABLE 406
BKPYV LARGE T ANTIGEN HLA-A*26 Epitope Peptides

| SEQ ID NO. | Sequence |
|---|---|
| 3044 | ELGVAIDQY |
| 3045 | ETKCEDVFLL |
| 3046 | EDVFLLLGMY |
| 3047 | DVFLLLGMY |
| 3048 | ETKQVSWKL |

TABLE 407
BKPYV LARGE T ANTIGEN HLA-A*68:01 Epitope Peptides

| SEQ ID NO. | Sequence |
|---|---|
| 3049 | DTSAPAEDSQR |
| 3050 | LVTMNEYPVPK |
| 3051 | CTFSFLICK |
| 3052 | AVDTVLAKK |
| 3053 | PVPKTLQAR |

TABLE 408
BKPYV LARGE T ANTIGEN HLA-B*07:02 Epitope Peptides

| SEQ ID NO. | Sequence |
|---|---|
| 3054 | LPSGHGINNL |
| 3055 | LPMERLTFEL |
| 3056 | RPKIYLRKSL |
| 3057 | GPIDSGKTTL |
| 3058 | FPSDLHQFL |

TABLE 409
BKPYV LARGE T ANTIGEN HLA-B*08 Epitope Peptides

| SEQ ID NO. | Sequence |
|---|---|
| 3059 | LAKKRVDTL |
| 3060 | TTKEKAQIL |
| 3061 | VPKRRYWL |
| 3062 | FLLEKRIL |
| 3063 | PLMRKAYL |

TABLE 410
BKPYV LARGE T ANTIGEN HLA-B*15:01 (B62) Epitope
Peptides

| SEQ ID NO. | Sequence |
|---|---|
| 3064 | RQIDFRPKIY |
| 3065 | KLMEKYSVTF |
| 3066 | ILYKKLMEKY |
| 3067 | LLGMYLEFQY |
| 3068 | NLPLMRKAY |

TABLE 411
BKPYV LARGE T ANTIGEN HLA-B*18 Epitope Peptides

| SEQ ID NO. | Sequence |
|---|---|
| 3069 | REEMLTERF |
| 3070 | QELHLCKGF |
| 3071 | NEKWDEDLF |
| 3072 | EEMLTERF |
| 3073 | MEKYSVTF |

TABLE 412
BKPYV LARGE T ANTIGEN HLA-B*27:05 Epitope Peptides

| SEQ ID NO. | Sequence |
|---|---|
| 3074 | ARFVRQIDFR |
| 3075 | KRILQSGMTL |
| 3076 | HRVSAINNF |
| 3077 | ERFNHILDK |
| 3078 | KRMNTLYKK |

TABLE 413
BKPYV LARGE T ANTIGEN HLA-B*35:01 Epitope Peptides

| SEQ ID NO. | Sequence |
|---|---|
| 3079 | GPIDSGKTTL |
| 3080 | LPMERLTFEL |
| 3081 | LPSGHGINNL |
| 3082 | FPSDLHQFL |
| 3083 | LPLMRKAYL |

TABLE 414
BKPYV LARGE T ANTIGEN HLA-B*58:02 Epitope Peptides

| SEQ ID NO. | Sequence |
|---|---|
| 3084 | KSLQNSEFLL |
| 3085 | KAQILYKKLM |
| 3086 | KAYLRKCKEF |
| 3087 | KTTLAAGLL |
| 3088 | KALNVNLPM |

TABLE 415
BKPYV LARGE T ANTIGEN HLA-DRB1*0101 Epitope
Peptides

| SEQ ID NO. | Sequence |
|---|---|
| 3089 | MVVFEDVKGTGAESK |
| 3090 | CEDVFLLLGMYLEFQ |
| 3091 | AAGLLDLCGGKALNV |
| 3092 | RMKYNICMGKCILDI |
| 3093 | QILYKKLMEKYSVTF |

TABLE 416
BKPYV LARGE T ANTIGEN HLA-DRB1*0301 (DR17)
Epitope Peptides

| SEQ ID NO. | Sequence |
|---|---|
| 3094 | PKDFPSDLHQFLSQA |
| 3095 | YKKMEQDVKVAHQPD |
| 3096 | EDMFASDEEATADSQ |
| 3097 | YMVVFEDVKGTGAES |
| 3098 | WGNLPLMRKAYLRKC |

TABLE 417
BKPYV LARGE T ANTIGEN HLA-DRB1*0401 (DR4Dw4)
Epitope Peptides

| SEQ ID NO. | Sequence |
|---|---|
| 3099 | PKDFPSDLHQFLSQA |
| 3100 | NSEFLLEKRILQSGM |
| 3101 | VADFATDIQSRIVEW |
| 3102 | CKGFQCFKRPKTPPP |
| 3103 | DKVLNREESMELMDL |

TABLE 418
BKPYV LARGE T ANTIGEN HLA-DRB1*0701 Epitope
Peptides

| SEQ ID NO. | Sequence |
|---|---|
| 3104 | QVSWKLITEYAVETK |
| 3105 | VDTLHMTREEMLTER |
| 3106 | WESWWSSFNEKWDED |
| 3107 | TFELGVAIDQYMVVF |
| 3108 | QPDFGTWSSSEVPTY |

TABLE 419
BKPYV LARGE T ANTIGEN HLA-DRB1*1101 Epitope
Peptides

| SEQ ID NO. | Sequence |
|---|---|
| 3109 | IFFLTPHRHRVSAIN |
| 3110 | YLLYSALTRDPYHTI |
| 3111 | PYHFKYHEKHFANAI |
| 3112 | HCIVFNVPKRRYWLF |
| 3113 | YMVVFEDVKGTGAES |

TABLE 420
BKPYV LARGE T ANTIGEN HLA-DRB1*1501 (DR2b)
Epitope Peptides

| SEQ ID NO. | Sequence |
|---|---|
| 3114 | CQKLCTFSFLICKGV |
| 3115 | DQYMVVFEDVKGTGA |
| 3116 | LLLLIWFRPVADFAT |
| 3117 | PSDLHQFLSQAVFSN |
| 3118 | GHNIIFFLTPHRHRV |

Method of Treating a Patient in Conjunction with a Hematopoietic Stem Cell Transplant by Administering a TVM or VM Composition

[0351] The invention includes a method to treat a patient receiving a HSCT, typically a human, by administering an effective amount of a TVM or VM composition described herein concomitantly with the administration of the HSCT or following administration of the HSCT.

[0352] The dose administered may vary according to the decision of the healthcare practitioner. In some embodiments, the TVM or VM composition is administered to a patient, such as a human in a dose ranging from 1×10⁶ cells/m² to 1×10⁸ cells/m² of each multi-antigen specific T-cell subpopulation and 1×10⁶ cells/kg to 1×10⁷ cells/kg of a mesenchymal stem cell subpopulation. The dose can be a single dose, for example, comprising the combination of all of the T-cell and MSC subpopulations in the TVM or VM combined composition, or in multiple separate doses, wherein each dose comprises a separate T-cell and MSC subpopulation and the collective separate doses of T-cell and MSC subpopulations comprise the total TVM or VM composition. In some embodiments, each T-cell subpopulation dosage is 1×10⁶ cells/m², 2×10⁶ cells/m², 3×10⁶ cells/m², 4×10⁶ cells/m², 5×10⁶ cells/m², 6×10⁶ cells/m², 7×10⁶ cells/m², 8×10⁶ cells/m², 9×10⁶ cells/m², 1×10⁷ cells/m², 2×10⁷ cells/m², 3×10⁷ cells/m², 4×10⁷ cells/m², 5×10⁷ cells/m², 6×10⁷ cells/m², 7×10⁷ cells/m², 8×10⁷ cells/m², 9×10⁷ cells/m², or 1×10⁸ cells/m². In some embodiments, each MSC subpopulation dosage is 1×10⁶ cells/kg, 2×10⁶ cells/kg, 3×10⁶ cells/kg, 4×10⁶ cells/kg, or 5×10⁶ cells/kg, 6×10⁶ cells/kg, 7×10⁶ cells/kg, 8×10⁶ cells/kg, 9×10⁶ cells/kg, or 1×10⁷ cells/kg.

[0353] The TVM or VM composition may be administered by any suitable method. In some embodiments, the TVM or VM composition is administered to a patient, such as a human as an infusion and in a particular embodiment, an infusion with a total volume of 1 to 20 cc. In some embodiments, the TVM or VM composition is administered to a patient as a 1, 2, 3, 4, 5, 6, 7, 8, 9, 10, 11, 12, 13, 14, 15, 16, 17, 18, 19, or 20 cc infusion. In some embodiments, the TVM or VM composition when present as an infusion is administered to a patient over 10, 20, 30, 40, 50, 60 or more minutes to the patient in need thereof.

[0354] In some embodiments, a patient receiving an infusion has vital signs monitored before, during, and 1-hour post infusion of the TVM or VM composition. In certain embodiments, patients with stable disease (SD), partial response (PR), or complete response (CR) up to 6 weeks after initial infusion may be eligible to receive additional infusions, for example, 1, 2, 3, 4, 5, 6, 7, 8, 9 or 10 additional infusions several weeks apart, for example, up to about 1, 2, 3, 4, 5, 6, 7, 8, 9 or 10 weeks apart.

### Determining the Tumor-Associated Antigen Expression Profile

[0355] Determining a TAA expression profile can be performed by any method known in the art. Non-limiting exemplary methods for determining a tumor-associated antigen expression profile can be found in Ding et al., Cancer Bio Med (2012) 9: 73-76; Qin et al., Leukemia Research (2009) 33(3) 384-390; and Weber et al., Leukemia (2009) 23: 1634-1642. In some embodiments, TAA expression profiles are generated from a sample collected from a patient with a malignancy or tumor. In some embodiments, the sample is selected from a group consisting of blood, bone marrow, and tumor biopsy.

[0356] In some embodiments, the TAA expression profile is determined from a blood sample of a patient with a malignancy or tumor. In some embodiments, the TAA expression profile is determined from a bone marrow sample of a patient with a malignancy or tumor. In some embodiments, the TAA expression profile is determined from a tumor biopsy sample of a patient with a malignancy or tumor.

[0357] In some embodiments, genetic material is extracted from the sample collected from a patient with a malignancy or tumor. In some embodiments, the genetic material is selected from a group consisting of total RNA, messenger RNA and genomic DNA.

[0358] After extraction of genetic material, quantitative reverse transcriptase polymerase chain reaction (qPCR) is performed on the genetic material utilizing primers developed from TAAs of interest.

[0359] The patient's tumor cells can be checked for reactivity against activated T-cell subpopulations and/or the TVM composition of the present invention using any known methods, including cytotoxicity assays described herein.

### Hematological and Solid Tumors Targeted for Treatment

[0360] The TVM compositions described herein can be used to treat a patient with a solid or hematological malignancy who is undergoing HSCT in conjunction with the administration of the TVM composition.

[0361] Lymphoid neoplasms are broadly categorized into precursor lymphoid neoplasms and mature T-cell, B-cell or natural killer cell (NK) neoplasms. Chronic leukemias are those likely to exhibit primary manifestations in blood and bone marrow, whereas lymphomas are typically found in extramedullary sites, with secondary events in the blood or bone. Over 79,000 new cases of lymphoma were estimated in 2013. Lymphoma is a cancer of lymphocytes, which are a type of white blood cell. Lymphomas are categorized as Hodgkin's or non-Hodgkin's. Over 48,000 new cases of leukemias were expected in 2013.

[0362] In some embodiments, the disease or disorder is a hematological malignancy selected from a group consisting of leukemia, lymphoma and multiple myeloma.

[0363] In some embodiments, the methods described herein can be used to treat a leukemia. For example, the patient such as a human may be suffering from an acute or chronic leukemia of a lymphocytic or myelogenous origin, such as, but not limited to: Acute lymphoblastic leukemia (ALL); Acute myelogenous leukemia (AML); Chronic lymphocytic leukemia (CLL); Chronic myelogenous leukemia (CML); juvenile myelomonocytic leukemia (JMML); hairy cell leukemia (HCL); acute promyelocytic leukemia (a subtype of AML); large granular lymphocytic leukemia; or Adult T-cell chronic leukemia. In some embodiments, the patient suffers from an acute myelogenous leukemia, for example an undifferentiated AML (M0); myeloblastic leukemia (M1; with/without minimal cell maturation); myeloblastic leukemia (M2; with cell maturation); promyelocytic leukemia (M3 or M3 variant [M3V]); myelomonocytic leukemia (M4 or M4 variant with eosinophilia [M4E]); monocytic leukemia (M5); erythroleukemia (M6); or megakaryoblastic leukemia (M7).

[0364] In a particular embodiment, the hematological malignancy is a lymphoma or lymphocytic or myelocytic proliferation disorder or abnormality. In some embodiments, the lymphoma is a non-Hodgkin's lymphoma. In some embodiments, the lymphoma is a Hodgkin's lymphoma. In some embodiments, the hematological malignancy is a relapsed or refractory leukemia, lymphoma, or myeloma.

[0365] In some aspects, the methods described herein can be used to treat a patient such as a human, with a Non-Hodgkin's Lymphoma such as, but not limited to: an AIDS-Related Lymphoma; Anaplastic Large-Cell Lymphoma; Angioimmunoblastic Lymphoma; Blastic NK-Cell Lymphoma; Burkitt's Lymphoma; Burkitt-like Lymphoma (Small Non-Cleaved Cell Lymphoma); Chronic Lymphocytic Leukemia/Small Lymphocytic Lymphoma; Cutaneous T-Cell Lymphoma; Diffuse Large B-Cell Lymphoma; Enteropathy-Type T-Cell Lymphoma; Follicular Lymphoma; Hepatosplenic Gamma-Delta T-Cell Lymphoma; Lymphoblastic Lymphoma; Mantle Cell Lymphoma; Marginal Zone Lymphoma; Nasal T-Cell Lymphoma; Pediatric Lymphoma; Peripheral T-Cell Lymphomas; Primary Central Nervous System Lymphoma; T-Cell Leukemias; Transformed Lymphomas; Treatment-Related T-Cell Lymphomas; or Waldenstrom's Macroglobulinemia.

[0366] Alternatively, the methods described herein can be used to treat a patient, such as a human, with a Hodgkin's Lymphoma, such as, but not limited to: Nodular Sclerosis Classical Hodgkin's Lymphoma (CHL); Mixed Cellularity CHL; Lymphocyte-depletion CHL; Lymphocyte-rich CHL; Lymphocyte Predominant Hodgkin Lymphoma; or Nodular Lymphocyte Predominant HL.

[0367] Alternatively, the methods described herein can be used to treat a patient, for example a human, with specific B-cell lymphoma or proliferative disorder such as, but not limited to: multiple myeloma; Diffuse large B cell lymphoma; Follicular lymphoma; Mucosa-Associated Lymphatic Tissue lymphoma (MALT); Small cell lymphocytic lymphoma; Mediastinal large B cell lymphoma; Nodal marginal zone B cell lymphoma (NMZL); Splenic marginal zone lymphoma (SMZL); Intravascular large B-cell lymphoma; Primary effusion lymphoma; or Lymphomatoid granulomatosis; B-cell prolymphocytic leukemia; Hairy cell leukemia; Splenic lymphoma/leukemia, unclassifiable; Splenic diffuse red pulp small B-cell lymphoma; Hairy cell leukemia-variant; Lymphoplasmacytic lymphoma; Heavy chain diseases, for example, Alpha heavy chain disease, Gamma heavy chain disease, Mu heavy chain disease; Plasma cell myeloma; Solitary plasmacytoma of bone; Extraosseous plasmacytoma; Primary cutaneous follicle center lymphoma; T cell/histiocyte rich large B-cell lymphoma; DLBCL associated with chronic inflammation; Epstein-Barr virus (EBV)+ DLBCL of the elderly; Primary mediastinal (thymic) large B-cell lymphoma; Primary cutaneous DLBCL, leg type; ALK+ large B-cell lymphoma; Plasmablastic lymphoma; Large B-cell lymphoma arising in HHV8-associated multicentric; Castleman disease; B-cell lymphoma, unclassifiable, with features intermediate between diffuse large B-cell lymphoma; or B-cell lymphoma, unclassifiable, with features intermediate between diffuse large B-cell lymphoma and classical Hodgkin lymphoma.

[0368] Abnormal proliferation of T-cells, B-cells, and/or NK-cells can result in a wide range of cancers. A host, for example a human, afflicted with any of these disorders can be treated with an effective amount of the TAA-L composition as described herein to achieve a decrease in symptoms (a palliative agent) or a decrease in the underlying disease (a disease modifying agent).

[0369] Alternatively, the methods described herein can be used to treat a patient, such as a human, with a hematological malignancy, for example but not limited to T-cell or NK-cell lymphoma, for example, but not limited to: peripheral T-cell lymphoma; anaplastic large cell lymphoma, for example anaplastic lymphoma kinase (ALK) positive, ALK negative anaplastic large cell lymphoma, or primary cutaneous anaplastic large cell lymphoma; angioimmunoblastic lymphoma; cutaneous T-cell lymphoma, for example mycosis fungoides, Sézary syndrome, primary cutaneous anaplastic large cell lymphoma, primary cutaneous CD30+ T-cell lymphoproliferative disorder; primary cutaneous aggressive epidermotropic CD8+ cytotoxic T-cell lymphoma; primary cutaneous gamma-delta T-cell lymphoma; primary cutaneous small/medium CD4+ T-cell lymphoma, and lymphomatoid papulosis; Adult T-cell Leukemia/Lymphoma (ATLL); Blastic NK-cell Lymphoma; Enteropathy-type T-cell lymphoma; Hematosplenic gamma-delta T-cell Lymphoma; Lymphoblastic Lymphoma; Nasal NK/T-cell Lymphomas; Treatment-related T-cell lymphomas; for example lymphomas that appear after solid organ or bone marrow transplantation; T-cell prolymphocytic leukemia; T-cell large granular lymphocytic leukemia; Chronic lymphoproliferative disorder of NK-cells; Aggressive NK cell leukemia; Systemic EBV+ T-cell lymphoproliferative disease of childhood (associated with chronic active EBV infection); Hydroa vacciniforme-like lymphoma; Adult T-cell leukemia/lymphoma; Enteropathy-associated T-cell lymphoma; Hepatosplenic T-cell lymphoma; or Subcutaneous panniculitis-like T-cell lymphoma.

[0370] In some embodiments, the TVM composition disclosed herein is used to treat a patient with a selected hematopoietic malignancy either before or after hematopoietic stem cell transplantation (HSCT). In some embodiments, the TVM composition is used to treat a patient with a selected hematopoietic malignancy after HSCT. In some embodiments, the TVM composition is used to treat a patient with a selected hematopoietic malignancy up to about 30, 35, 40, 45, or 50 days after HSCT. In some embodiments, the TVM composition is used to treat a patient with a selected hematopoietic malignancy after neutrophil engraftment during the period following HSCT. In some embodiments, the TVM composition is used to treat a patient with a selected hematopoietic malignancy before HSCT, such as one week, two weeks, three weeks or more before HSCT.

[0371] In some aspects, the tumor is a solid tumor. In some embodiments, the solid tumor is Wilms Tumor. In some embodiments, the solid tumor is osteosarcoma. In some embodiments, the solid tumor is Ewing's sarcoma. In some embodiments, the solid tumor is neuroblastoma. In some embodiments, the solid tumor is soft tissue sarcoma. In some embodiments, the solid tumor is rhabdomyosarcoma. In some embodiments, the solid tumor is glioma. In some embodiments, the solid tumor is germ cell cancer. In some embodiments, the solid tumor is breast cancer. In some embodiments, the solid tumor is lung cancer. In some embodiments the solid tumor is ovarian cancer. In some embodiments, the solid tumor is renal cell carcinoma. In some embodiments, the solid tumor is colon cancer. In some embodiments, the solid tumor is melanoma. In some embodiments, the solid tumor is a relapsed or refractory solid tumor.

[0372] Non-limiting examples of tumors that can be treated according to the present invention include, but are not limited to, acoustic neuroma, adenocarcinoma, adrenal gland cancer, anal cancer, angiosarcoma (e.g., lymphangiosarcoma, lymphangioendotheli osarcoma, hemangiosarcoma), appendix cancer, benign monoclonal gammopathy, biliary cancer (e.g., cholangiocarcinoma), bladder cancer, breast cancer (e.g., adenocarcinoma of the breast, papillary carcinoma of the breast, mammary cancer, medullary carcinoma of the breast, triple negative breast cancer, HER2-negative breast cancer, HER2-positive breast cancer, male breast cancer, late-line metastatic breast cancer, progesterone receptor-negative breast cancer, progesterone receptor-positive breast cancer, recurrent breast cancer), brain cancer (e.g., meningioma; glioma, e.g., astrocytoma, oligodendroglioma; medulloblastoma), bronchus cancer, carcinoid tumor, cervical cancer (e.g., cervical adenocarcinoma), choriocarcinoma, chordoma, craniopharyngioma, colorectal cancer (e.g., colon cancer, rectal cancer, colorectal adenocarcinoma), epithelial carcinoma, ependymoma, endotheliosarcoma (e.g., Kaposi's sarcoma, multiple idiopathic hemorrhagic sarcoma), endometrial cancer (e.g., uterine cancer, uterine sarcoma), esophageal cancer (e.g., adenocarcinoma of the esophagus, Barrett's adenocarcinoma), Ewing's sarcoma, eye cancer (e.g., intraocular melanoma, retinoblastoma), familiar hypereosinophilia, gall bladder cancer, gastric cancer (e.g., stomach adenocarcinoma), gastrointestinal stromal tumor (GIST), glioblastoma multiforme, head and neck cancer (e.g., head and neck squamous cell carcinoma, oral cancer (e.g., oral squamous cell carcinoma (OSCC), throat cancer (e.g., laryngeal cancer, pharyngeal cancer, nasopharyngeal cancer, oropharyngeal cancer)), heavy chain disease (e.g., alpha chain disease, gamma chain disease, mu chain disease), hemangioblastoma, inflammatory myofibroblastic tumors, immunocytic amyloidosis, kidney cancer (e.g., nephroblastoma a.k.a. Wilms' tumor, renal cell carcinoma), liver cancer (e.g., hepatocellular cancer (HCC), malignant hepatoma), lung cancer (e.g., bronchogenic carcinoma, small cell lung cancer (SCLC), non-small cell lung cancer (NSCLC), adenocarcinoma of the lung), leiomyosarcoma (LMS), mastocytosis (e.g., systemic mastocytosis), myelodysplastic syndrome (MDS), mesothelioma, myeloproliferative disorder (MPD) (e.g., polycythemia Vera (PV), essential thrombocytosis (ET), neurofibroma (e.g., neurofibromatosis (NF) type 1 or type 2, schwannomatosis), neuroendocrine cancer (e.g., gastroenteropancreatic neuroendoctrine tumor (GEP-NET), carcinoid tumor), osteosarcoma, ovarian cancer (e.g., cystadenocarcinoma, ovarian embryonal carcinoma, ovarian adenocarcinoma), papillary adenocarcinoma, pancreatic cancer (e.g., pancreatic adenocarcinoma, intraductal papillary mucinous neoplasm (IPMN), Islet cell tumors), penile cancer (e.g., Paget's disease of the penis and scrotum), pinealoma, primitive neuroectodermal tumor (PNT), prostate cancer (e.g., prostate adenocarcinoma), rectal cancer, rhabdomyosarcoma, salivary gland cancer, skin cancer (e.g., squamous cell carcinoma (SCC), keratoacanthoma (KA), melanoma, basal cell carcinoma (BCC)), small bowel cancer (e.g., appendix cancer), soft tissue sarcoma (e.g., malignant fibrous histiocytoma (MFH), liposarcoma, malignant peripheral nerve sheath tumor (MPNST), chondrosarcoma, fibrosarcoma, myxosarcoma), sebaceous gland carcinoma, sweat gland carcinoma, synovioma, testicular cancer (e.g., seminoma, testicular embryonal carcinoma), thyroid cancer (e.g., papillary carcinoma of the thyroid, papillary thyroid carcinoma (PTC), medullary thyroid cancer), urethral cancer, vaginal cancer and vulvar cancer (e.g., Paget's disease of the vulva).

Non-Cancer Disorders Targeted for Treatment with Hematopoietic Stem Cell Transplant

[0373] The VM compositions described herein can be used to treat a patient with a non-cancer disorder who is undergoing HSCT. In some embodiments, the disease or disorder is an autoimmune disease. In some embodiments, the disease or disorder is a metabolic disorder. In some embodiments, the disease or disorder is a primary immune deficiency disorder.

[0374] In some embodiments, the methods described herein can be used to treat a patient with an autoimmune disease. Non-limiting examples of autoimmune diseases that can be treated with HSCT include, but are not limited to, Achalasia, Addison's disease, Adult Still's disease, Agammaglobulinemia, Alopecia areata, Amyloidosis, Ankylosing spondylitis, Anti-GBM/Anti-TBM nephritis, Antiphospholipid syndrome, Autoimmune angioedema, Autoimmune dysautonomia, Autoimmune encephalomyelitis, Autoimmune hepatitis, Autoimmune inner ear disease (AIED), Autoimmune myocarditis, Autoimmune oophoritis, Autoimmune orchitis, Autoimmune pancreatitis, Autoimmune retinopathy, Autoimmune urticaria, Axonal & neuronal neuropathy (AMAN), Baló disease, Behcet's disease, Benign mucosal pemphigoid, Bullous pemphigoid, Castleman disease (CD), Celiac disease, Chagas disease, Chronic inflammatory demyelinating polyneuropathy (CIDP), Chronic recurrent multifocal osteomyelitis (CRMO), Churg-Strauss Syndrome (CSS) or Eosinophilic Granulomatosis (EGPA), Cicatricial pemphigoid, Cogan's syndrome, Cold agglutinin disease, Congenital heart block, Coxsackie myocarditis, CREST syndrome, Crohn's disease, Dermatitis herpetiformis, Dermatomyositis, Devic's disease (neuromyelitis optica), Diamond-Blackfan anemia, Discoid lupus, Dressler's syndrome, Endometriosis, Eosinophilic esophagitis (EoE), Eosinophilic fasciitis, Erythema nodosum, Essential mixed cryoglobulinemia, Evans syndrome, Fibromyalgia, Fibrosing alveolitis, Giant cell arteritis (temporal arteritis), Giant cell myocarditis, Glomerulonephritis, Goodpasture's syndrome, Granulomatosis with Polyangiitis, Graves' disease, Guillain-Barre syndrome, Hashimoto's thyroiditis, Hemolytic anemia, Hemophagocytic lymphohistiocytosis (HLH), Henoch-Schonlein purpura (HSP), Herpes gestationis or pemphigoid gestationis (PG), Hidradenitis Suppurativa (HS) (Acne Inversa), Hypogammalglobulinemia, IgA Nephropathy, IgG4-related sclerosing disease, Immune thrombocytopenic purpura (ITP), Inclusion body myositis (IBM), Interstitial cystitis (IC), Juvenile arthritis, Juvenile diabetes (Type 1 diabetes), Juvenile myositis (JM), Kawasaki disease, Lambert-Eaton syndrome, Leukocytoclastic vasculitis, Lichen planus, Lichen sclerosus, Ligneous conjunctivitis, Linear IgA disease (LAD), Lupus, Lyme disease chronic, Meniere's disease, Microscopic polyangiitis (MPA), Mixed connective tissue disease (MCTD), Mooren's ulcer, Mucha-Habermann disease, Multifocal Motor Neuropathy (MMN) or MMNCB, Multiple sclerosis, Myasthenia gravis, Myositis, Narcolepsy, Neonatal Lupus, Neuromyelitis optica, Neutropenia, Ocular cicatricial pemphigoid, Optic neuritis, Palindromic rheumatism (PR), PANDAS, Paraneoplastic cerebellar degeneration (PCD), Paroxysmal nocturnal hemoglobinuria (PNH), Parry Romberg syndrome, Pars planitis (peripheral uveitis), Parsonnage-Turner syndrome, Pemphigus, Peripheral neuropathy, Perivenous encephalomyelitis, Pernicious anemia (PA), POEMS syndrome, Polyarteritis nodosa, Polyglandular syndromes type I, II, III, Polymyalgia rheumatica, Polymyositis, Postmyocardial infarction syndrome, Postpericardiotomy syndrome, Primary biliary cirrhosis, Primary sclerosing cholangitis, Progesterone dermatitis, Psoriasis, Psoriatic arthritis, Pure red cell aplasia (PRCA), Pyoderma gangrenosum, Raynaud's phenomenon, Reactive Arthritis, Reflex sympathetic dystrophy, Relapsing polychondritis, Restless legs syndrome (RLS), Retroperitoneal fibrosis, Rheumatic fever, Rheumatoid arthritis, Sarcoidosis, Schmidt syndrome, Scleritis, Scleroderma, Sjögren's syndrome, Sperm & testicular autoimmunity, Stiff person syndrome (SPS), Subacute bacterial endocarditis (SBE), Susac's syndrome, Sympathetic ophthalmia (SO), Takayasu's arteritis, Temporal arteritis/Giant cell arteritis, Thrombocytopenic purpura (TTP), Tolosa-Hunt syndrome (THS), Transverse myelitis, Type 1 diabetes, Ulcerative colitis (UC), Undifferentiated connective tissue disease (UCTD), Uveitis, Vasculitis, Vitiligo, Vogt-Koyanagi-Harada Disease, and Wegener's granulomatosis (or Granulomatosis with Polyangiitis (GPA)).

[0375] In another embodiment, VM compositions and methods described herein can be used to treat a patient with a metabolic disorder undergoing a HSCT. Non-limiting examples of metabolic disorders that can be treated with HSCT include, but are not limited to, mucopolysaccharidosis, including MPS I (Hurler, Scheie, H-S syndrome), MPS II (Hunter syndrome), MPS III A-D (Sanfilippo A-D syndrome), MPS IV A-B (Morquio A-B syndrome), MPS VI (Maroteaux-Lamy syndrome), MPS VII (Sly syndrome); glycoproteinosis, including, but not limited to aspartylglucosaminuria, fucosidosis, α-Mannosidosis, β-Mannosidosis, Mucolipidosis III and IV (sialidosis), Schindler disease; Sphingolipidosis, including but not limited to Fabry's disease, Farber's (lipogranulomatosis, Gaucher's I-III, GM1 gangliosidosis, Niemann-Pick disease A and B, Tay-Sachs disease, Sandhoff s disease, Globoid leukodystrophy (Krabbe disease), metachromatic leukodystrophy (MLD), other lipidosis, including but not limited to Niemann-Pick disease C, Wolman disease, Ceroid lipofuscinosis Type III (Batten ds); glycogen storage disorders including but not limited to GSD type II (Pompe disease); multiple enzyme deficiency disorders, including but not limited to galactosialidosis, mucolipidosis type II (I-cell disease), and other mucolipidoses; lysosomal transport defects, including but not limited to cystinosis, sialic acid storage disease, Salla disease; peroxisomal storage disorders (PSD) including but not limited to adrenoleukodystrophy, adrenomyeloneuropathy. Inherited genetic disorders include, but are not limited to hemoglobinopathies including b-Thalassemia major, a-Thalassemia major, and Sickle cell anemia; hematopoietic diseases including osteopetrosis, Diamond-Blackfan syndrome, Shwachman-Diamond syndrome, Dyskeratosis congenita, Fanconi anemia, Congenital amegakaryocytic thrombocytopenia; haemoglobinopathies including severe SS anaemia, Congenital erythropoietic porphyria (CEP, Gunther's disease, Congenital dyserythropoietic anaemia (CDA) types I and II, Hereditary sideroblastic anaemia, Pyruvate kinase deficiency; Platelet disorders including Glanzmann's thrombasthenia.

[0376] In yet another embodiment, the VM compositions and methods described herein can be used to treat a patient with a primary immune deficiency disorder that is undergoing a HSCT. Non-limiting examples of primary immune deficiency disorder that can be treated with HSCT include, but are not limited to, Primary immune deficiencies include, but are not limited to, Wiskott-Aldrich syndrome, Epidermolysis bullosa, Severe congenital neutropenia, Thalassemia major, Leukocyte adhesion deficiency, chronic granulomatous disease, familial hemophagocytic lymphohistiocytosis, hyperimmunoglobulin M (HIgM) syndrome, severe combined immunodeficiency (SCID), and leukocyte adhesion deficiency type 1 (LAD1), Bare Lymphocyte Syndrome, CD40 Ligand Deficiency, Chediak-Higashi Syndrome, Combined Immunodeficiency Disease, hemophagocytosis, and leukocyte lymphoproliferative syndrome. T/B+ SCID, γc deficiency, JAK3 deficiency, interleukin 7 r deficiency, CD45 deficiency, CD3δ/CD3ε deficiency, TB-SCID, RAG 1/2 deficiency, DCLRE1C deficiency, ADA deficiency, reticular dysgenesis, Omenn syndrome, DNA ligase type IV deficiency, Cernunnos deficiency, CD40 ligand deficiency, CD40 deficiency, Purine nucleoside phosphorylase (PNP) deficiency, CD3γ deficiency, CD8 deficiency, ZAP-70 deficiency, Ca++ channel deficiency, MHC class I deficiency, MHC class II deficiency, Winged helix deficiency, CD25 deficiency, STAT5b deficiency, Itk deficiency, and DOCK8 deficiency, infantile agranulocytosis (Kostman's syndrome), lazy leukocyte syndrome (neutrophil actin deficiency), neutrophil membrane GP-180 deficiency, agammaglobulinemia, and X-linked lymphoproliferative syndrome.

### Administration of TVM and VM Compositions

[0377] Methods for administration of cells for adoptive cell therapy are known and may be used in connection with the provided methods and TVM or VM compositions. For example, adoptive T cell therapy methods are described, e.g., in US Patent Application Publication No. 2003/0170238 to Gruenberg et al; U.S. Pat. No. 4,690,915 to Rosenberg; Rosenberg (2011) Nat Rev Clin Oncol. 8(10):577-85). See, e.g., Themeli et al. (2013) Nat Biotechnol. 31(10): 928-933; Tsukahara et al. (2013) Biochem Biophys Res Commun 438(1): 84-9; Davila et al. (2013) PLoS ONE 8(4): e61338.

[0378] The administration of the TVM or VM composition may vary. In one aspect, the TVM or VM composition may be administered to a patient such as a human at an interval selected from once every 1 week, 2 weeks, 3 weeks, 4 weeks, 5 weeks, 6 weeks, 7 weeks, 8 weeks, or more after the initial administration of the TVM or VM composition. In a typical embodiment, the TVM or VM composition is administered in an initial dose then at every 4 weeks thereafter. In some embodiments, the TVM or VM composition may be administered repetitively to 1, 2, 3, 4, 5, 6, or more times after the initial administration of the composition. In a typical embodiment, the TVM or VM composition is administered repetitively up to 10 more times after the initial administration of the TVM or VM composition. In an alternative embodiment, the TVM or VM composition is administered more than 10 times after the initial administration of the TVM or VM composition.

[0379] In some embodiments for the treatment of a patient undergoing HSCT with cancer, a TAA expression profile of the malignancy or tumor of the patient, for example, a human is performed prior to the initial administration of the TVM composition. In some embodiments, a TAA expression profile of the malignancy or tumor of the patient is performed prior to each subsequent administration of the TVM composition, allowing for the option to adjust the TVM composition. In some embodiments, the TVM composition of subsequent administrations remains the same as the initial administration. In some embodiments, the TVM composition of subsequent administrations is changed based on the change in the TAA expression profile of the malignancy or tumor of the patient.

[0380] In some embodiments, the TVM or VM compositions are administered to a subject in the form of a pharmaceutical composition, such as a composition comprising the cells or cell populations and a pharmaceutically acceptable carrier or excipient. The pharmaceutical compositions in some embodiments additionally comprise other pharmaceutically active agents or drugs, such as chemotherapeutic agents, e.g., asparaginase, busulfan, carboplatin, cisplatin, daunorubicin, doxorubicin, fluorouracil, gemcitabine, hydroxyurea, methotrexate, paclitaxel, rituximab, vinblastine, vincristine, etc. In some embodiments, the agents are administered in the form of a salt, e.g., a pharmaceutically acceptable salt. Suitable pharmaceutically acceptable acid addition salts include those derived from mineral acids, such as hydrochloric, hydrobromic, phosphoric, metaphosphoric, nitric, and sulphuric acids, and organic acids, such as tartaric, acetic, citric, malic, lactic, fumaric, benzoic, glycolic, gluconic, succinic, and arylsulphonic acids, for example, p-toluenesulphonic acid.

[0381] The choice of carrier in the pharmaceutical composition may be determined in part by the by the particular method used to administer the cell composition. Accordingly, there are a variety of suitable formulations. For example, the pharmaceutical composition can contain preservatives. Suitable preservatives may include, for example, methylparaben, propylparaben, sodium benzoate, and benzalkonium chloride. In some aspects, a mixture of two or more preservatives is used. The preservative or mixtures thereof are typically present in an amount of about 0.0001% to about 2% by weight of the total composition.

[0382] In addition, buffering agents in some aspects are included in the composition. Suitable buffering agents include, for example, citric acid, sodium citrate, phosphoric acid, potassium phosphate, and various other acids and salts. In some aspects, a mixture of two or more buffering agents is used. The buffering agent or mixtures thereof are typically present in an amount of about 0.001% to about 4% by weight of the total composition. Methods for preparing administrable pharmaceutical compositions are known. Exemplary methods are described in more detail in, for example, Remington: The Science and Practice of Pharmacy, Lippincott Williams & Wilkins 21st ed. (May 1, 2005).

[0383] In some embodiments, the pharmaceutical composition comprises the TVM or VM composition in an amount that is effective to treat or prevent the disease or condition, such as a therapeutically effective or prophylactically effective amount. Thus, in some embodiments, the methods of administration include administration of the TVM or VM composition at effective amounts. Therapeutic or prophylactic efficacy in some embodiments is monitored by periodic assessment of treated subjects. For repeated administrations over several days or longer, depending on the condition, the treatment is repeated until a desired suppression of disease symptoms occurs. However, other dosage regimens may be useful and can be determined. The desired dosage can be delivered by a single bolus administration of the composition, by multiple bolus administrations of the composition, or by continuous infusion administration of the composition.

[0384] In some embodiments, the TVM or VM composition is administered at a desired dosage, which in some aspects includes a desired dose or number of cells and/or a desired number of T-cell subpopulations. Thus, the dosage of cells in some embodiments is based on a total number of cells (or number per m² body surface area or per kg body weight) and a desired amount of the individual populations or sub-types. In some embodiments, the dosage of cells is based on a desired total number (or number per m² body surface area or per kg of body weight) of cells in the individual populations or of individual cell types. In some embodiments, the dosage is based on a combination of such features, such as a desired number of total cells, and desired total number of cells in the individual populations.

[0385] In some embodiments, the TVM or VM composition is administered at or within a tolerated difference of a desired dose of total cells, such as a desired dose of T cells or MSCs. In some aspects, the desired dose is a desired number of cells, a desired number of cells per unit of body surface area or a desired number of cells per unit of body weight of the subject to whom the cells are administered, e.g., cells/m² or cells/kg. In some aspects, the desired dose is at or above a minimum number of cells or minimum number of cells per unit of body surface area or body weight. In some aspects, among the total cells, administered at the desired dose, the individual populations or sub-types are present at or near a desired output ratio as described herein, e.g., within a certain tolerated difference or error of such a ratio.

[0386] In some embodiments, the cells are administered at or within a tolerated difference of a desired dose. In some aspects, the desired dose is a desired number of cells, or a desired number of such cells per unit of body surface area or body weight of the subject to whom the cells are administered, e.g., cells/m² or cells/kg. In some aspects, the desired dose is at or above a minimum number of cells of the population, or minimum number of cells of the population per unit of body surface area or body weight.

[0387] Thus, in some embodiments, the dosage is based on a desired fixed dose of total cells and/or based on a desired fixed dose of two or more, e.g., each, of the individual T-cell and MSC subpopulations. Thus, in some embodiments, the dosage is based on a desired fixed or minimum dose of T-cell and MSC subpopulations and a desired ratio thereof.

[0388] In certain embodiments, TVM or VM composition is administered to the subject at a range of about one million to about 100 billion cells, such as, e.g., 1 million to about 50 billion cells (e.g., about 5 million cells, about 25 million cells, about 500 million cells, about 1 billion cells, about 5 billion cells, about 20 billion cells, about 30 billion cells, about 40 billion cells, or a range defined by any two of the foregoing values), such as about 10 million to about 100 billion cells (e.g., about 20 million cells, about 30 million cells, about 40 million cells, about 60 million cells, about 70 million cells, about 80 million cells, about 90 million cells, about 10 billion cells, about 25 billion cells, about 50 billion cells, about 75 billion cells, about 90 billion cells, or a range defined by any two of the foregoing values), and in some cases about 100 million cells to about 50 billion cells (e.g., about 120 million cells, about 250 million cells, about 350 million cells, about 450 million cells, about 650 million cells, about 800 million cells, about 900 million cells, about 3 billion cells, about 30 billion cells, about 45 billion cells) or any value in between these ranges.

[0389] In some embodiments, the dose of total cells and/or dose of individual T-cell subpopulations of cells is within a range of between at or about 10⁴ and at or about 10⁹ cells/meter² (m²) body surface area, such as between 10⁵ and 10⁶ cells/m² body surface area, for example, at or about 1×10⁵ cells/m², 1.5×10⁵ cells/m², 2×10⁵ cells/m², or 1×10⁶ cells/m² body surface area. For example, in some embodiments, the cells are administered at, or within a certain range of error of, between at or about 10⁴ and at or about 10⁹ T cells/meter² (m²) body surface area, such as between 10⁵ and 10⁶ T cells/m² body surface area, for example, at or about 1×10⁵ T cells/m², 1.5×10⁵ T cells/m², 2×10⁵ T cells/m², or 1×10⁶ T cells/m² body surface area.

[0390] In some embodiments, the cells are administered at or within a certain range of error of between at or about 10⁴ and at or about 10⁹ cells/meter² (m²) body weight, such as between 10⁵ and 10⁶ cells/m² body weight, for example, at or about 1×10⁵ cells/m², 1.5×10⁵ cells/m², 2×10⁵ cells/kg, or 1×10⁶ cells/m² body surface area.

### Product Release Testing and Characterization of T-Cell Subpopulations

[0391] Prior to infusion, the TVM or VM composition may be characterized for safety and release testing. Product release testing, also known as lot or batch release testing, is an important step in the quality control process of drug substances and drug products. This testing verifies that a T-cell or MSC subpopulation and/or TVM or VM composition meets a pre-determined set of specifications. Pre-determined release specifications for T-cell and MSC subpopulations and TVM or VM compositions include confirmation that the cell product is >70% viable, has <5.0 EU/ml of endotoxin, is negative for aerobic, anaerobic, fungal pathogens and mycoplasma, and slacks reactivity to allogeneic PHA blasts, for example, with less than 10% lysis to PHA blasts. The phenotype of the T-cell subpopulations comprising the TVM or VM composition may be determined with requirements for clearance to contain, in one non-limiting embodiment, <2% dendritic cells and <2% B cells. The HLA identity between the T-cell subpopulations comprising the TVM or VM composition and the donor is also confirmed. The phenotype of the MSC subpopulation comprising the TVM or VM composition may be determined by flow cytometry with requirements for clearance to contain, in one non-limiting embodiment >90% CD73+, CD90+, and CD105+ cells; <2% CD34+, CD45+, CD14+, and CD19+ cells; and <5% HLA-DR+ cells.

[0392] Antigen specificity of the T-cell subpopulations can be tested via an Interferon-γ Enzyme-Linked Immunospot (IFNγ ELISpot) assay. Other cytokines can also be utilized to measure antigen specificity including TNFα and IL-4. Pre-stimulated effector cells and target cells pulsed with the TAAs or VAAs of interest are incubated in a 96-well plate (pre-incubated with anti-INF- [symbol] antibody) at an E/T ratio of 1:2. They are compared with a no antigen control, an irrelevant peptide not used for T-cell generation, and SEB as a positive control. After washing, the plates are incubated with a biotinylated anti-IFN- [symbol] antibody. Spots are detected by incubating with streptavidin-coupled alkaline phosphastase and substrate. Spot forming cells (SFCs) are counted and evaluated using an automated plate reader.

[0393] The phenotype of the TVM or VM composition can be determined by extracellular antibody staining with anti-CD3, CD4, CD8, CD14, CD16, CD19, CD34, CD45, CD56, CD73, CD83, CD90, CD105, HLA-DR, TCRαβ, TCRγδ and analyzed on a flow cytometer. Annexin-V and PI antibodies can be used as viability controls, and data analyzed with FlowJo Flow Cytometry software (Treestar, Ashland, Oreg., USA).

[0394] The lytic capacity of T-cell subpopulations can be evaluated via ⁵¹Chromium (⁵¹Cr) and Europium (Eu)-release cytotoxicity assays to test recognition and lysis of target cells by the T-cell subpopulations comprising the TVM compositions.

[0395] Typically, activated primed T-cells (effector cells) can be tested against ⁵¹Cr-labeled target cells at effector-to-target ratios of, for example, 40:1, 20:1, 10:1, and 5:1. Cytolytic activity can be determined by measuring ⁵¹Cr release into the supernatant on a gamma-counter. Spontaneous release is assessed by incubating target cells alone, and maximum lysis by adding 1% Triton X-100. Specific lysis was calculated as: specific lysis (%)=(experimental release−spontaneous release)/(maximum release−spontaneous release)×100.

[0396] Europium-release assays can also be utilized to measure the lytic capacity of T-cell subpopulations comprising the TVM or VM compositions. This is a non-radioactive alternative to the conventional Chromium-51 (⁵¹Cr) release assay and works on the same principle as the radioactive assay. Target cells are first loaded with an acetoxymethyl ester of BATDA. The ligand penetrates the cell membrane quickly. Within the cell, the ester bonds are hydrolyzed to form a hydrophilic ligand (TDA), which no longer passes through the cell membrane. If cells are lysed by an effector cell, TDA is released outside the cell into the supernatant. Upon addition of Europium solution to the supernatant, Europium can form a highly fluorescent and stable chelate with the released TDA (EuTDA). The measured fluorescence signal correlates directly with the number of lysed cells in the cytotoxicity assay. Specific lysis was calculated as: specific lysis (%)=(experimental release−spontaneous release)/(maximum release−spontaneous release)×100.

### Monitoring

[0397] Following administration of the cells, the biological activity of the administered cell populations in some embodiments is measured, e.g., by any of a number of known methods. Parameters to assess include specific binding of a T-cell or other immune cell to antigen, in vivo, e.g., by imaging, or ex vivo, e.g., by ELISA or flow cytometry. In certain embodiments, the ability of the administered cells to destroy target cells can be measured using any suitable method known in the art, such as cytotoxicity assays described in, for example, Kochenderfer et al., J. Immunotherapy, 32(7): 689-702 (2009), and Herman et al. J. Immunological Methods, 285(1): 25-40 (2004), all incorporated herein by reference. In certain embodiments, the biological activity of the cells is measured by assaying expression and/or secretion of one or more cytokines, such as IFNγ, IL-2, and TNF. In some aspects the biological activity is measured by assessing clinical outcome, such as reduction in tumor burden or load.

### Combination Therapies

[0398] In one aspect of the invention, TVM or VM compositions disclosed herein can be beneficially administered in combination with another therapeutic regimen for beneficial, additive, or synergistic effects.

[0399] In some embodiments, the TVM composition is administered in combination with another therapy to treat a hematological malignancy. In some embodiments, the TVM composition is administered in combination with another therapy to treat a solid tumor. The second therapy can be a pharmaceutical or a biologic agent (for example an antibody) to increase the efficacy of treatment with a combined or synergistic approach.

[0400] In some embodiments, the additional therapy is a monoclonal antibody (MAb). Some MAbs stimulate an immune response that destroys tumor cells. Similar to the antibodies produced naturally by B cells, these MAbs “coat” the tumor cell surface, triggering its destruction by the immune system. FDA-approved MAbs of this type include rituximab, which targets the CD20 antigen found on non-Hodgkin lymphoma cells, and alemtuzumab, which targets the CD52 antigen found on B-cell chronic lymphocyticleukemia (CLL) cells. Rituximab may also trigger cell death (apoptosis) directly. Another group of MAbs stimulates an antitumor immune response by binding to receptors on the surface of immune cells and inhibiting signals that prevent immune cells from attacking the body's own tissues, including tumor cells. Other MAbs interfere with the action of proteins that are necessary for tumor growth. For example, bevacizumab targets vascular endothelial growth factor (VEGF), a protein secreted by tumor cells and other cells in the tumor's microenvironment that promotes the development of tumor blood vessels. When bound to bevacizumab, VEGF cannot interact with its cellular receptor, preventing the signaling that leads to the growth of new blood vessels. Similarly, cetuximab and panitumumab target the epidermal growth factor receptor (EGFR). MAbs that bind to cell surface growth factor receptors prevent the targeted receptors from sending their normal growth-promoting signals. They may also trigger apoptosis and activate the immune system to destroy tumor cells. Another group of tumor therapeutic MAbs are the immunoconjugates. These MAbs, which are sometimes called immunotoxins or antibody-drug conjugates, consist of an antibody attached to a cell-killing substance, such as a plant or bacterial toxin, a chemotherapy drug, or a radioactive molecule. The antibody latches onto its specific antigen on the surface of a tumor cell, and the cell-killing substance is taken up by the cell. FDA-approved conjugated MAbs that work this way include 90Y-ibritumomab tiuxetan, which targets the CD20 antigen to deliver radioactive yttrium-90 to B-cell non-Hodgkin lymphoma cells; ¹³¹I-tositumomab, which targets the CD20 antigen to deliver radioactive ¹³¹I to non-Hodgkin lymphoma cells.

[0401] In some embodiments, the additional agent is an immune checkpoint inhibitor (ICI), for example, but not limited to PD-1 inhibitors, PD-L1 inhibitors, PD-L2 inhibitors, CTLA-4 inhibitors, LAG-3 inhibitors, TIM-3 inhibitors, and V-domain Ig suppressor of T-cell activation (VISTA) inhibitors, or combinations thereof.

[0402] In some embodiments, the immune checkpoint inhibitor is a PD-1 inhibitor that blocks the interaction of PD-1 and PD-L1 by binding to the PD-1 receptor, and in turn inhibits immune suppression. In some embodiments, the immune checkpoint inhibitor is a PD-1 immune checkpoint inhibitor selected from nivolumab (Opdivo®), pembrolizumab (Keytruda®), pidilizumab, AMP-224 (AstraZeneca and MedImmune), PF-06801591 (Pfizer), MEDI0680 (AstraZeneca), PDR001 (Novartis), REGN2810 (Regeneron), MGA012 (MacroGenics), BGB-A317 (BeiGene) SHR-12-1 (Jiangsu Hengrui Medicine Company and Incyte Corporation), TSR-042 (Tesaro), and the PD-L1/VISTA inhibitor CA-170 (Curis Inc.).

[0403] In some embodiments, the immune checkpoint inhibitor is the PD-1 immune checkpoint inhibitor nivolumab (Opdivo®) administered in an effective amount for the treatment of Hodgkin's lymphoma. In another aspect of this embodiment, the immune checkpoint inhibitor is the PD-1 immune checkpoint inhibitor pembrolizumab (Keytruda®) administered in an effective amount. In an additional aspect of this embodiment, the immune checkpoint inhibitor is the PD-1 immune checkpoint inhibitor pidilizumab (Medivation) administered in an effective amount for refractory diffuse large B-cell lymphoma (DLBCL).

[0404] In some embodiments, the immune checkpoint inhibitor is a PD-L1 inhibitor that blocks the interaction of PD-1 and PD-L1 by binding to the PD-L1 receptor, and in turn inhibits immune suppression. PD-L1 inhibitors include, but are not limited to, atezolizumab, durvalumab, KNO35CA-170 (Curis Inc.), and LY3300054 (Eli Lilly).

[0405] In some embodiments, the immune checkpoint inhibitor is the PD-L1 immune checkpoint inhibitor atezolizumab (Tecentriq®) administered in an effective amount. In another aspect of this embodiment, the immune checkpoint inhibitor is durvalumab (AstraZeneca and MedImmune) administered in an effective. In yet another aspect of the embodiment, the immune checkpoint inhibitor is KN035 (Alphamab). An additional example of a PD-L1 immune checkpoint inhibitor is BMS-936559 (Bristol-Myers Squibb), although clinical trials with this inhibitor have been suspended as of 2015.

[0406] In one aspect of this embodiment, the immune checkpoint inhibitor is a CTLA-4 immune checkpoint inhibitor that binds to CTLA-4 and inhibits immune suppression. CTLA-4 inhibitors include, but are not limited to, ipilimumab, tremelimumab (AstraZeneca and MedImmune), AGEN1884 and AGEN2041 (Agenus).

[0407] In some embodiments, the CTLA-4 immune checkpoint inhibitor is ipilimumab (Yervoy®) administered in an effective amount

[0408] In another embodiment, the immune checkpoint inhibitor is a LAG-3 immune checkpoint inhibitor. Examples of LAG-3 immune checkpoint inhibitors include, but are not limited to, BMS-986016 (Bristol-Myers Squibb), GSK2831781 (GlaxoSmithKline), IMP321 (Prima BioMed), LAG525 (Novartis), and the dual PD-1 and LAG-3 inhibitor MGD013 (MacroGenics). In yet another aspect of this embodiment, the immune checkpoint inhibitor is a TIM-3 immune checkpoint inhibitor. A specific TIM-3 inhibitor includes, but is not limited to, TSR-022 (Tesaro).

[0409] Other immune checkpoint inhibitors for use in combination with the invention described herein include, but are not limited to, B7-H3/CD276 immune checkpoint inhibitors such as MGA217, indoleamine 2,3-dioxygenase (IDO) immune checkpoint inhibitors such as Indoximod and INCB024360, killer immunoglobulin-like receptors (KIRs) immune checkpoint inhibitors such as Lirilumab (BMS-986015), carcinoembryonic antigen cell adhesion molecule (CEACAM) inhibitors (e.g., CEACAM-1, -3 and/or -5). Exemplary anti-CEACAM-1 antibodies are described in WO 2010/125571, WO 2013/082366 and WO 2014/022332, e.g., a monoclonal antibody 34B1, 26H7, and 5F4; or a recombinant form thereof, as described in, e.g., US 2004/0047858, U.S. Pat. No. 7,132,255 and WO 99/052552. In other embodiments, the anti-CEACAM antibody binds to CEACAM-5 as described in, e.g., Zheng et al. PLoS One. 2010 Sep. 2; 5(9). pii: e12529 (DOI:10: 1371/journal.pone.0021146), or cross-reacts with CEACAM-1 and CEACAM-5 as described in, e.g., WO 2013/054331 and US 2014/0271618. Still other checkpoint inhibitors can be molecules directed to B and T lymphocyte attenuator molecule (BTLA), for example as described in Zhang et al., Monoclonal antibodies to B and T lymphocyte attenuator (BTLA) have no effect on in vitro B cell proliferation and act to inhibit in vitro T cell proliferation when presented in a cis, but not trans, format relative to the activating stimulus, Clin Exp Immunol. 2011 January; 163(1): 77-87.

[0410] Current chemotherapeutic drugs that may be used in combination with the TVM composition described herein include those used to treat AML including cytarabine (cytosine arabinoside or ara-C) and the anthracycline drugs (such as daunorubicin/daunomycin, idarubicin, and mitoxantrone). Some of the other chemo drugs that may be used to treat AML include: Cladribine (Leustatin®, 2-CdA), Fludarabine (Fludara®), Topotecan, Etoposide (VP-16), 6-thioguanine (6-TG), Hydroxyurea (Hydrea®), Corticosteroid drugs, such as prednisone or dexamethasone (Decadron®), Methotrexate (MTX), 6-mercaptopurine (6-MP), Azacitidine (Vidaza®), Decitabine (Dacogen®). Additional drugs include dasatinib and checkpoint inhibitors such as novolumab, Pembrolizumab, and atezolizumab.

[0411] Current chemotherapeutic drugs that may be used in combination with the TVM composition described herein include those used for CLL and other lymphomas including: purine analogs such as fludarabine (Fludara®), pentostatin (Nipent®), and cladribine (2-CdA, Leustatin®), and alkylating agents, which include chlorambucil (Leukeran®) and cyclophosphamide (Cytoxan®) and bendamustine (Treanda®). Other drugs sometimes used for CLL include doxorubicin (Adriamycin®), methotrexate, oxaliplatin, vincristine (Oncovin®), etoposide (VP-16), and cytarabine (ara-C). Other drugs include Rituximab (Rituxan), Obinutuzumab (Gazyva™), Ofatumumab (Arzerra®), Alemtuzumab (Campath®) and Ibrutinib (Imbruvica™)

[0412] Current chemotherapeutic drugs that may be used in combination with the TVM composition described herein include those used for CML including: Interferon, imatinib (Gleevec), the chemo drug hydroxyurea (Hydrea®), cytarabine (Ara-C), busulfan, cyclophosphamide (Cytoxan®), and vincristine (Oncovin®). Omacetaxine (Synribo®) is a chemo drug that was approved to treat CML that is resistant to some of the TKIs now in use.

[0413] Current chemotherapeutic drugs that may be used in combination with the TVM composition described herein include those used for CMML, for example, Deferasirox (Exjade®), cytarabine with idarubicin, cytarabine with topotecan, and cytarabine with fludarabine, Hydroxyurea (hydroxycarbamate, Hydrea®), azacytidine (Vidaza®) and decitabine (Dacogen®).

[0414] Current chemotherapeutic drugs that may be used in combination with the TVM composition described herein include those used for multiple myeloma include Pomalidomide (Pomalyst®), Carfilzomib (Kyprolis™), Everolimus (Afinitor®), dexamethasone (Decadron), prednisone and methylprednisolone (Solu-medrol®) and hydrocortisone.

[0415] Current chemotherapeutic drugs that may be used in combination with the TVM composition described herein include those used for Hodgkin's disease include Brentuximab vedotin (Adcetris™): anti-CD-30, Rituximab, Adriamycin® (doxorubicin), Bleomycin, Vinblastine, Dacarbazine (DTIC).

[0416] Current chemotherapeutic drugs that may be used in combination with the TVM composition described herein include those used for Non-Hodgkin's disease include Rituximab (Rituxan®), Ibritumomab (Zevalin®), tositumomab (Bexxar®), Alemtuzumab (Campath®) (CD52 antigen), Ofatumumab (Arzerra®), Brentuximab vedotin (Adcetris®) and Lenalidomide (Revlimid®).

[0417] Current chemotherapeutic drugs that may be used in combination with the TVM composition described herein include those used for:

[0418] B-Cell Lymphoma, for Example:

[0419] Diffuse large B-cell lymphoma: CHOP (cyclophosphamide, doxorubicin, vincristine, and prednisone), plus the monoclonal antibody rituximab (Rituxan). This regimen, known as R-CHOP, is usually given for about 6 months.

[0420] Primary Mediastinal B-Cell Lymphoma: R-CHOP.

[0421] Follicular lymphoma: rituximab (Rituxan) combined with chemo, using either a single chemo drug (such as bendamustine or fludarabine) or a combination of drugs, such as the CHOP or CVP (cyclophosphamide, vincristine, prednisone regimens. The radioactive monoclonal antibodies, ibritumomab (Zevalin) and tositumomab (Bexxar) are also possible treatment options. For patients who may not be able to tolerate more intensive chemo regimens, rituximab alone, milder chemo drugs (such as chlorambucil or cyclophosphamide).

[0422] Chronic Lymphocytic Leukemia/Small Lymphocytic Lymphoma: R-CHOP.

[0423] Mantle cell lymphoma: fludarabine, cladribine, or pentostatin; bortezomib (Velcade) and lenalidomide (Revlimid) and ibrutinib (Imbruvica).

[0424] Extranodal marginal zone B-cell lymphoma—mucosa-associated lymphoid tissue (MALT) lymphoma: rituximab; chlorambucil or fludarabine or combinations such as CVP, often along with rituximab.

[0425] Nodal marginal zone B-cell lymphoma: rituximab (Rituxan) combined with chemo, using either a single chemo drug (such as bendamustine or fludarabine) or a combination of drugs, such as the CHOP or CVP (cyclophosphamide, vincristine, prednisone regimens. The radioactive monoclonal antibodies, ibritumomab (Zevalin) and tositumomab (Bexxar) are also possible treatment options. For patients who may not be able to tolerate more intensive chemo regimens, rituximab alone, milder chemo drugs (such as chlorambucil or cyclophosphamide).

[0426] Splenic marginal zone B-cell lymphoma: rituximab; patients with Hep C—anti-virals.

[0427] Burkitt lymphoma: methotrexate; hyper-CVAD—cyclophosphamide, vincristine, doxorubicin (also known as Adriamycin), and dexamethasone. Course B consists of methotrexate and cytarabine; CODOX-M—cyclophosphamide, doxorubicin, high-dose methotrexate/ifosfamide, etoposide, and high-dose cytarabine; etoposide, vincristine, doxorubicin, cyclophosphamide, and prednisone (EPOCH)

[0428] Lymphoplasmacytic lymphoma—rituximab.

[0429] Hairy cell leukemia—cladribine (2-CdA) or pentostatin; rituximab; interferon-alfa

[0430] T-cell lymphomas, for example:

[0431] Precursor T-lymphoblastic lymphoma/leukemia—cyclophosphamide, doxorubicin (Adriamycin), vincristine, L-asparaginase, methotrexate, prednisone, and, sometimes, cytarabine (ara-C). Because of the risk of spread to the brain and spinal cord, a chemo drug such as methotrexate is also given into the spinal fluid.

[0432] Skin lymphomas: Gemcitabine Liposomal doxorubicin (Doxil); Methotrexate; Chlorambucil; Cyclophosphamide; Pentostatin; Etoposide; Temozolomide; Pralatrexate; R-CHOP.

[0433] Angioimmunoblastic T-cell lymphoma: prednisone or dexamethasone.

[0434] Extranodal natural killer/T-cell lymphoma, nasal type: CHOP.

[0435] Anaplastic large cell lymphoma: CHOP; pralatrexate (Folotyn), targeted drugs such as bortezomib (Velcade) or romidepsin (Istodax), or immunotherapy drugs such as alemtuzumab (Campath) and denileukin diftitox (Ontak).

[0436] Primary central nervous system (CNS) lymphoma—methotrexate; rituximab.

[0437] A more general list of suitable chemotherapeutic agents includes, but are not limited to, radioactive molecules, toxins, also referred to as cytotoxins or cytotoxic agents, which includes any agent that is detrimental to the viability of cells, agents, and liposomes or other vesicles containing chemotherapeutic compounds. Examples of suitable chemotherapeutic agents include but are not limited to 1-dehydrotestosterone, 5-fluorouracil decarbazine, 6-mercaptopurine, 6-thioguanine, actinomycin D, adriamycin, aldesleukin, alkylating agents, allopurinol sodium, altretamine, amifostine, anastrozole, anthramycin (AMC)), anti-mitotic agents, cis-dichlorodiamine platinum (II) (DDP) cisplatin), diamino dichloro platinum, anthracyclines, antibiotics, antis, asparaginase, BCG live (intravesical), betamethasone sodium phosphate and betamethasone acetate, bicalutamide, bleomycin sulfate, busulfan, calcium leucouorin, calicheamicin, capecitabine, carboplatin, lomustine (CCNU), carmustine (BSNU), Chlorambucil, Cisplatin, Cladribine, Colchicin, conjugated estrogens, Cyclophosphamide, Cyclothosphamide, Cytarabine, Cytarabine, cytochalasin B, Cytoxan, Dacarbazine, Dactinomycin, dactinomycin (formerly actinomycin), daunorubicin HCl, daunorucbicin citrate, denileukin diftitox, Dexrazoxane, Dibromomannitol, dihydroxy anthracin dione, Docetaxel, dolasetron mesylate, doxorubicin HCl, dronabinol, E. coli L-asparaginase, emetine, epoetin-α, Erwinia L-asparaginase, esterified estrogens, estradiol, estramustine phosphate sodium, ethidium bromide, ethinyl estradiol, etidronate, etoposide citrororum factor, etoposide phosphate, filgrastim, floxuridine, fluconazole, fludarabine phosphate, fluorouracil, flutamide, folinic acid, gemcitabine HCl, glucocorticoids, goserelin acetate, gramicidin D, granisetron HCl, hydroxyurea, idarubicin HCl, ifosfamide, interferon α-2b, irinotecan HCl, letrozole, leucovorin calcium, leuprolide acetate, levamisole HCl, lidocaine, lomustine, maytansinoid, mechlorethamine HCl, medroxyprogesterone acetate, megestrol acetate, melphalan HCl, mercaptipurine, mesna, methotrexate, methyltestosterone, mithramycin, mitomycin C, mitotane, mitoxantrone, nilutamide, octreotide acetate, ondansetron HCl, paclitaxel, pamidronate disodium, pentostatin, pilocarpine HCl, plimycin, polifeprosan 20 with carmustine implant, porfimer sodium, procaine, procarbazine HCl, propranolol, rituximab, sargramostim, streptozotocin, tamoxifen, taxol, teniposide, tenoposide, testolactone, tetracaine, thioepa chlorambucil, thioguanine, thiotepa, topotecan HCL, toremifene citrate, trastuzumab, tretinoin, valrubicin, vinblastine sulfate, vincristine sulfate, and vinorelbine tartrate.

[0438] Additional therapeutic agents that can be administered in combination with the TVM compositions disclosed herein can include bevacizumab, sutinib, sorafenib, 2-methoxyestradiol, finasunate, vatalanib, vandetanib, aflibercept, volociximab, etaracizumab, cilengitide, erlotinib, cetuximab, panitumumab, gefitinib, trastuzumab, atacicept, rituximab, alemtuzumab, aldesleukine, atlizumab, tocilizumab, temsirolimus, everolimus, lucatumumab, dacetuzumab, atiprimod, natalizumab, bortezomib, carfilzomib, marizomib, tanespimycin, saquinavir mesylate, ritonavir, nelfinavir mesylate, indinavir sulfate, belinostat, panobinostat, mapatumumab, lexatumumab, oblimersen, plitidepsin, talmapimod, enzastaurin, tipifarnib, perifosine, imatinib, dasatinib, lenalidomide, thalidomide, simvastatin, and celecoxib.

[0439] In one aspect of the present invention, the TVM or VM compositions disclosed herein are administered in combination with at least one immunosuppressive agent. The immunosuppressive agent may be selected from the group consisting of a calcineurin inhibitor, e.g. a cyclosporin or an ascomycin, e.g. Cyclosporin A (NEORAL®), tacrolimus, a mTOR inhibitor, e.g. rapamycin or a derivative thereof, e.g. Sirolimus (RAPAMUNE®), Everolimus (Certican®), temsirolimus, biolimus-7, biolimus-9, a rapalog, e.g. azathioprine, campath 1H, a S1P receptor modulator, e.g. fingolimod or an analogue thereof, an anti-IL-8 antibody, mycophenolic acid or a salt thereof, e.g. sodium salt, or a prodrug thereof, e.g. Mycophenolate Mofetil (CELLCEPT®), OKT3 (ORTHOCLONE OKT3®), Prednisone, ATGAM®, THYMOGLOBULIN®, Brequinar Sodium, 15-deoxyspergualin, tresperimus, Leflunomide ARAVA®, anti-CD25, anti-IL2R, Basiliximab (SIMULECT®), Daclizumab (ZENAPAX®), mizorbine, methotrexate, dexamethasone, pimecrolimus (Elidel®), abatacept, belatacept, etanercept (Enbrel®), adalimumab (Humira®), infliximab (Remicade®), an anti-LFA-1 antibody, natalizumab (Antegren®), Enlimomab, ABX-CBL, antithymocyte immunoglobulin, siplizumab, and efalizumab.

[0440] In one aspect of the present invention, the TVM or VM composition described herein can be administered in combination with at least one anti-inflammatory agent. The anti-inflammatory agent can be a steroidal anti-inflammatory agent, a nonsteroidal anti-inflammatory agent, or a combination thereof. In some embodiments, anti-inflammatory drugs include, but are not limited to, alclofenac, alclometasone dipropionate, algestone acetonide, alpha amylase, amcinafal, amcinafide, amfenac sodium, amiprilose hydrochloride, anakinra, anirolac, anitrazafen, apazone, balsalazide disodium, bendazac, benoxaprofen, benzydamine hydrochloride, bromelains, broperamole, budesonide, carprofen, cicloprofen, cintazone, cliprofen, clobetasol propionate, clobetasone butyrate, clopirac, cloticasone propionate, cormethasone acetate, cortodoxone, deflazacort, desonide, desoximetasone, dexamethasone dipropionate, diclofenac potassium, diclofenac sodium, diflorasone diacetate, diflumidone sodium, diflunisal, difluprednate, diftalone, dimethyl sulfoxide, drocinonide, endrysone, enlimomab, enolicam sodium, epirizole, etodolac, etofenamate, felbinac, fenamole, fenbufen, fenclofenac, fenclorac, fendosal, fenpipalone, fentiazac, flazalone, fluazacort, flufenamic acid, flumizole, flunisolide acetate, flunixin, flunixin meglumine, fluocortin butyl, fluorometholone acetate, fluquazone, flurbiprofen, fluretofen, fluticasone propionate, furaprofen, furobufen, halcinonide, halobetasol propionate, halopredone acetate, ibufenac, ibuprofen, ibuprofen aluminum, ibuprofen piconol, ilonidap, indomethacin, indomethacin sodium, indoprofen, indoxole, intrazole, isoflupredone acetate, isoxepac, isoxicam, ketoprofen, lofemizole hydrochloride, lomoxicam, loteprednol etabonate, meclofenamate sodium, meclofenamic acid, meclorisone dibutyrate, mefenamic acid, mesalamine, meseclazone, methylprednisolone suleptanate, morniflumate, nabumetone, naproxen, naproxen sodium, naproxol, nimazone, olsalazine sodium, orgotein, orpanoxin, oxaprozin, oxyphenbutazone, paranyline hydrochloride, pentosan polysulfate sodium, phenbutazone sodium glycerate, pirfenidone, piroxicam, piroxicam cinnamate, piroxicam olamine, pirprofen, prednazate, prifelone, prodolic acid, proquazone, proxazole, proxazole citrate, rimexolone, romazarit, salcolex, salnacedin, salsalate, sanguinarium chloride, seclazone, sermetacin, sudoxicam, sulindac, suprofen, talmetacin, talniflumate, talosalate, tebufelone, tenidap, tenidap sodium, tenoxicam, tesicam, tesimide, tetrydamine, tiopinac, tixocortol pivalate, tolmetin, tolmetin sodium, triclonide, triflumidate, zidometacin, zomepirac sodium, aspirin (acetylsalicylic acid), salicylic acid, corticosteroids, glucocorticoids, tacrolimus, pimecorlimus, prodrugs thereof, co-drugs thereof, and combinations thereof.

[0441] In one aspect of the present invention, the TVM or VM composition described herein can be administered in combination with at least one immunomodulatory agent.

[0442] In another embodiment, the TMV or VM composition can be used in combination with anti-viral therapy is used to treat viral complications of HSCT includes, but are not limited to, valgancyclovir, ganciclovir, acyclovir, cidofovir, foscarnet, and vidarabine. Immunosuppressive agents, such as corticosteroids, Rituximab, Leflunomide Azathioprene, and cyclosporine, are sometimes also used to temporarily reduce viral symptoms in patients and can be used in combination with the TMV or VM therapy. In addition, cytotoxic chemotherapy can be used to treat viral complications. A variety of agents have been used including cyclophosphamide, anthracyclines, vincristine, etoposide, and prednisone.

Methods of Manufacturing TAA and/or VAA T-Cell Subpopulations that Comprise the TVM and VM Compositions

[0443] T-cell subpopulations specific for multiple TAA or VAA to be combined into the TVM or VM composition for therapeutic administration described herein can be generated using any known method in the art or as described herein. Activated T-cell subpopulations that recognize at least one epitope of an antigen of a tumor or virus can be generated by any method known in the art or as described herein. Non-limiting exemplary methods of generating activated T-cell subpopulations that recognize at least one epitope of an antigen of a tumor or virus can be found in, for example Shafer et al., Leuk Lymphoma (2010) 51(5):870-880; Cruz et al., Clin Cancer Res., (2011) 17(22): 7058-7066; Quintarelli et al., Blood (2011) 117(12): 3353-3362; Hanley et al., Cytotherapy (2011) 13: 976-986; Gerdemann et al., Mol Ther (2012) 20(8) 1622-1632; and Chapuis et al., Sci Transl Med (2013) 5(174):174ra27, all incorporated herein by reference.

[0444] Generally, generating the T-cell subpopulations of the TVM or VM compositions of the present invention may involve (i) collecting a peripheral blood mononuclear cell product from a donor; (ii) determining the HLA subtype of the mononuclear cell product; (iii) separating the monocytes and the lymphocytes of the mononuclear cell product; (iv) generating and maturing dendritic cells (DCs) from the monocytes; (v) pulsing the DCs with one or multiple TAAs or VAAs, as desired; (vi) optionally carrying out a CD45RA+ selection to isolate naïve lymphocytes; (vii) stimulating the naïve lymphocytes with the peptide-pulsed DCs in the presence of a cytokine cocktail; (viii) repeating the T cell stimulation with fresh peptide-pulsed DCs or other peptide-pulsed antigen presenting cells in the presence of a cytokine cocktail; (ix) harvesting the T-cells and optionally cryopreserving for future use.

[0445] In some aspects, generating the T-cell subpopulations of the TVM or VM compositions of the present invention may involve (i) collecting a peripheral blood mononuclear cell product from a donor; (ii) determining the HLA subtype of the mononuclear cell product; (iii) separating the monocytes and the lymphocytes of the mononuclear cell product; (iv) generating and maturing dendritic cells (DCs) from the monocytes; (v) pulsing the DCs with one or multiple TAAs or VAAs, as desired; (vi) optionally carrying out a CD45RA+ selection to isolate naïve T-cells; (vii) stimulating the naïve T-cells with the peptide-pulsed DCs in the presence of a cytokine cocktail; (viii) repeating the T-cell stimulation with fresh peptide-pulsed DCs or other peptide-pulsed antigen presenting cells in the presence of a cytokine cocktail; (ix) harvesting the T-cells and optionally cryopreserving for future use.

Collecting a Peripheral Blood Mononuclear Cell Product from a Donor

[0446] The generation of T-cell subpopulations to be specific to one or multiple TAAs or VAAs generally requires a peripheral blood mononuclear cell (PBMC) product from a donor, either an allogeneic or autologous donor, as a starting material. Isolation of PBMCs is well known in the art. Non-limiting exemplary methods of isolating PBMCs are provided in Grievink, H. W., et al. (2016) “Comparison of three isolation techniques for human peripheral blood mononuclear cells: Cell recovery and viability, population composition, and cell functionality,” Biopreservation and BioBanking, which is incorporated herein by reference. The PBMC product can be isolated from whole blood, an apheresis sample, a leukapheresis sample, or a bone marrow sample provided by a donor. In some embodiments, the starting material is an apheresis sample, which provides a large number of initially starting mononuclear cells, potentially allowing a large number of different T-cell subpopulations to be generated. In some embodiments, the PBMC product is isolated from a sample containing peripheral blood mononuclear cells (PBMCs) provided by a donor. In some embodiments, the donor is a healthy donor. In some embodiments, the PBMC product is derived from cord blood. In some embodiments, the donor is the same donor providing stem cells for a hematopoietic stem cell transplant (HSCT).

### Determining HLA Subtype

[0447] When the T-cell subpopulations are generated from an allogeneic, healthy donor, the HLA subtype profile of the donor source is determined and characterized. Determining HLA subtype (i.e., typing the HLA loci) can be performed by any method known in the art. Non-limiting exemplary methods for determining HLA subtype can be found in Lange, V., et al., BMC Genomics (2014)15: 63; Erlich, H., Tissue Antigens (2012) 80:1-11; Bontadini, A., Methods (2012) 56:471-476; Dunn, P. P., Int J Immunogenet (2011) 38:463-473; and Hurley, C. K., “DNA-based typing of HLA for transplantation.” in Leffell, M. S., et al., eds., Handbook of Human Immunology, 1997. Boca Raton: CRC Press, each independently incorporated herein by reference. Preferably, the HLA-subtyping of each donor source is as complete as possible.

[0448] In some embodiments, the determined HLA subtypes include at least 4 HLA loci, preferably HLA-A, HLA-B, HLA-C, and HLA-DRB1. In some embodiments, the determined HLA subtypes include at least 6 HLA loci. In some embodiments, the determined HLA subtypes include at least 6 HLA loci. In some embodiments, the determined HLA subtypes include all of the known HLA loci. In general, typing more HLA loci is preferable for practicing the invention, since the more HLA loci that are typed, the more likely the allogeneic T-cell subpopulations selected will have highest activity relative to other allogeneic T-cell subpopulations that have HLA alleles or HLA allele combinations in common with the patient or the diseased cells in the patient.

### Separating the Monocytes and the Lymphocytes of the Peripheral Blood Mononuclear Cell Product

[0449] In general, the PBMC product may be separated into various cell-types, for example, into platelets, red blood cells, lymphocytes, and monocytes, and the lymphocytes and monocytes retained for initial generation of the T-cell subpopulations. The separation of PBMCs is known in the art. Non-limiting exemplary methods of separating monocytes and lymphocytes include Vissers et al., J Immunol Methods. 1988 Jun. 13; 110(2):203-7 and Wahl et al., Current Protocols in Immunology (2005) 7.6A.1-7.6A.10, which are incorporated herein by reference. For example, the separation of the monocytes can occur by plate adherence, by CD14+ selection, or other known methods. The monocyte fraction is generally retained in order to generate dendritic cells used as an antigen presenting cell in the T-cell subpopulation manufacture. The lymphocyte fraction of the PBMC product can be cryopreserved until needed, for example, aliquots of the lymphocyte fraction (˜5×10⁷ cells) can be cryopreserved separately for both Phytohemagglutinin (PHA) Blast expansion and T-cell subpopulation generation.

### Generating Dendritic Cells

[0450] The generation of mature dendritic cells used for antigen presentation to prime T-cells is well known in the art. Non-limiting exemplary methods are included in Nair et al., “Isolation and generation of human dendritic cells.” Current protocols in immunology (2012) 0 7: Unit7.32. doi:10.1002/0471142735.im0732s99 and Castiello et al., Cancer Immunol Immunother, 2011 April; 60(4):457-66, which are incorporated herein by reference. For example, the monocyte fraction can be plated into a closed system bioreactor such as the Quantum Cell Expansion System, and the cells allowed to adhere for 2-4 hours at which point 1,000 U/mL of IL-4 and 800 U/mL GM-CSF can be added. The concentration of GM-CSF and IL-4 can be maintained. The dendritic cells can be matured using a cytokine cocktail. In some embodiments the cytokine cocktail consists of LPS (30 ng/mL), IL-4 (1,000 U/mL), GM-CSF (800 U/mL), TNF-Alpha (10 ng/mL), IL-6 (100 ng/mL), and IL-1beta (10 ng/mL). The dendritic cell maturation generally occurs in 2 to 5 days. In some embodiments, the adherent DCs are harvested and counted using a hemocytometer. In some embodiments, a portion of the DCs are cryopreserved for additional further stimulations.

### Pulsing the Dendritic Cells

[0451] The non-mature and mature dendritic cells are pulsed with one or more tumor and or viral peptides, which can be individually selected, selected as an intentional optimized subset, or with a TAA or VAA overlapping peptide library. For example, the dendritic cells can be pulsed using one or more peptides, for example specific epitopes and/or a overlapping peptide library. Methods of pulsing a dendritic cell with a overlapping peptide library are known. For example, about 100 ng of one or more peptides of the TAA or VAA, for example a peptide library (PepMix), can be added per 10 million dendritic cells and incubated for about 30 to 120 minutes.

### Naïve T-Cell Selection of Lymphocytes

[0452] In order to increase the potential number of specific TAA or VAA activated T-cells and reduce T-cells that target other antigens, it is preferable to utilize naïve T-cells as a starting material. To isolate naïve T-cells, the lymphocytes can undergo a selection, for example CD45RA+ cells selection. CD45RA+ cell selection methods are generally known in the art. Non-limiting exemplary methods are found in Richards et al., Immune memory in CD4+ CD45RA+ T cells. Immunology. 1997; 91(3):331-339 and McBreen et al., J Virol. 2001 May; 75(9): 4091-4102, which are incorporated herein by reference. For example, to select for CD45RA⁺ cells, the cells can be labeled using 1 vial of CD45RA microbeads from Miltenyi Biotec per 1×10¹¹ cells after 5-30 minutes of incubation with 100 mL of CliniMACS buffer and approximately 3 mL of 10% human IVIG, 10 ug/mL DNAase I, and 200 mg/mL of magnesium chloride. After 30 minutes, cells will be washed sufficiently and resuspended in 20 mL of CliniMACS buffer. The bag will then be set up on the CLINIMACS Plus device and the selection program can be run according to manufacturer's recommendations. After the program is completed, cells can be counted, washed and resuspended in “CTL Media” consisting of 44.5% EHAA Click's, 44.5% Advanced RPMI, 10% Human Serum, and 1% GlutaMAX.

Stimulating Naïve T Cells with Peptide-Pulsed Dendritic Cells

[0453] Prior to stimulating naïve T-cells with the dendritic cells, it may be preferable to irradiate the DCs, for example, at 25 Gy. The DCs and naïve T-cells are then co-cultured. The naïve T-cells can be co-cultured in a ratio range of DCs to T cells of about 1:5-1:50, for example, 1:5; 1:10, 1:15, 1:20, 1:25, 1:30, 1:35, 1:40, 1:45, or about 1:50. The DCs and T-cells are generally co-cultured with cytokines. In some embodiments, the cytokines are selected from a group consisting of IL-6 (100 ng/mL), IL-7 (10 ng/mL), IL-15 (5 ng/mL), IL-12 (10 ng/mL), and IL-21 (10 ng/mL).

### Second T Cell Stimulation

[0454] In general, it may be preferable to further stimulate the T-cell subpopulations with one or additional stimulation procedures. The additional stimulation can be performed with, for example, fresh DCs pulsed with the same peptides as used in the first stimulation, similarly to as described above. In some embodiments, the cytokines used during the second stimulation are selected from a group consisting of IL-7 (10 ng/mL) and IL-2 (100 U/mL).

[0455] Alternatively, peptide-pulsed PHA blasts can be used as the antigen presenting cell. The use of peptide-pulsed PHA blasts to stimulate and expand T-cells are well known in the art. Non-limiting exemplary methods can be found in Weber et al., Clin Cancer Res. 2013 Sep. 15; 19(18): 5079-5091 and Ngo et al., J Immunother. 2014 May; 37(4): 193-203, which are incorporated herein by reference. The peptide-pulsed PHA blasts can be used to expand the T-cell subpopulation in a ratio range of PHA blasts to expanded T cells of 10:1-1:10. For example, the ratio of PHA blasts to T cells can be 10:1, between 10:1 and 9:1, between 9:1 and 8:1, between 8:1 and 7:1, between 7:1 and 6:1, between 6:1 and 5:1, between 5:1 and 4:1, between 4:1 and 3:1, between 3:1 and 2:1, between 2:1 and 1:1, between 1:1 and 1:2, between 1:2 and 1:3, between 1:3 and 1:4, between 1:4 and 1:5, between 1:5 and 1:6, between 1:6 and 1:7, between 1:7 and 1:8, between 1:8 and 1:9, between 1:9 and 1:10. In general, cytokines are included in the co-culture, and are selected from the group consisting of IL-7 (10 ng/mL) and IL-2 (100 U/mL).

Additional T-Cell Expansion and T-Cell Subpopulation Harvest Additional T cell stimulations may be necessary to generate the necessary number of T-cell subpopulations for use in the TVM or VM composition. Following any stimulation and expansion, the T-cell subpopulations are harvested, washed, and concentrated. In some embodiments, a solution containing a final concentration of 10% dimethyl sulfoxide (DMSO), 50% human serum albumin (HSA), and 40% Hank's Balanced Salt Solution (HBSS) will then be added to the cryopreservation bag. In some embodiments, the T-cell subpopulations will be cryopreserved in liquid nitrogen.

### Further Characterization of the T-Cell Subpopulations

[0456] The T-cell subpopulations for use in the TVM or VM composition of the present invention are HLA-typed and can be further characterized prior to use or inclusion in the TVM or VM composition. For example, each of the T-cell subpopulations may be further characterized by, for example, one or more of i) determining the TAA or VAA specificity of the T-cell subpopulation; ii) identifying the tumor associated antigen or virus associated antigen epitope(s) the T-cell subpopulation is specific to; iii) determining whether the T-cell subpopulation includes MHC Class I or Class II restricted subsets or a combination of both; iv) correlating antigenic activity through the T-cell's corresponding HLA-allele; and v) characterizing the T-cell subpopulation's immune effector subtype concentration, for example, the population of effector memory cells, central memory cells, γδ T-cells, CD8+, CD4+, NKT-cell.

### Determining the Tumor- or Virus-Associated Antigen Specificity of the T-Cell Subpopulation

[0457] The T-cell subpopulations of the TVM or VM composition can be further characterized by determining each T-cell subpopulation's specificity for its targeted antigen. Specificity can be determined using any known procedure, for example, an ELISA based immunospot assay (ELISpot). In some embodiments, tumor-associated antigen specificity of the T-cell subpopulation is determined by ELISpot assay. In some embodiments, virus-associated antigen specificity of the T-cell subpopulation is determined by ELISpot assay. ELISpot assays are widely used to monitor adaptive immune responses in both humans and animals. The method was originally developed from the standard ELISA assay to measure antibody secretion from B cells (Czerkinsky C. et al. (1983) A solid-phase enzyme-linked immunospot (ELISPOT) assay for enumeration of specific antibody-secreting cells. J. Immunol Methods 65: 109-21), which is incorporated herein by reference. The assay has since been adapted to detect secreted cytokines from T cells, for example IFN-γ, and is an essential tool for understanding the helper T cell response.

[0458] A T-cell ELISpot assay generally comprises the following steps:

[0459] i) a capture antibody specific for the chosen analyte, for example IFN-γ, is coated onto a PVDF plate;

[0460] ii) the plate is blocked, usually with a serum;

[0461] iii) the T-cell subpopulation is added along with the specific, targeted tumor- or virus-associated antigen;

[0462] iv) plates are incubated and secreted cytokines, for example IFN-γ, are captured by the immobilized antibody on the PVDF surface;

[0463] v) after washing, a biotinylated detection antibody is added to allow detection of the captured cytokine; and

[0464] vi) the secreted cytokine is visualized using an avidin-HRP or avidin-ALP conjugate and a colored precipitating substrate.

Each colored spot represents a cytokine secreting cell. The spots can be counted by eye or by using an automated plate-reader. Many different cytokines can be detected using this method including IL-2, IL-4, IL-17, IFN γ, TNFα, and granzyme B. The size of the spot is an indication of the per cell productivity and the avidity of the binding. The higher the avidity of the T cell recognition the higher the productivity resulting in large, well-defined spots.

### Identifying the TAA or VAA Epitope(s) the T-Cell Subpopulation is Specific to

[0465] The T-cell subpopulations of the TVM or VM composition can be further characterized by identifying the specific TAA or VAA epitope or epitopes to which the T-cell subpopulation is specific to. This may be especially useful when more than one TAA or VAA peptide is used to prime the T-cell subpopulation. Determining TAA or VAA epitope specificity is generally known in the art. Non-limiting exemplary methods include Ohminami et al., Blood. 2000 Jan. 1; 95(1):286-93; Oka et al., Immunogenetics. 2000 February; 51(2):99-107; and Bachinsky et al., Cancer Immun. 2005 Mar. 22; 5:6; Kuzushima et al., Blood (2003) 101:1460-1468; Kondo et al., Blood (2004) 103(2): 630-638; Hanley et al., Blood (2009) 114(9): 1958-1967; and Hanley et al., Cytotherapy (2011) 13: 976-986, which are each incorporated herein by reference. For example, to identify the epitopes with TAA or VAA specific activity antigen peptide libraries can be grouped into pools in which each peptide is represented in two or more pools as a quick screening tool in an Elispot assay, and the pools showing activity determined. Common peptides represented in both pools can then be further screened to identify the specific peptide epitopes which show activity.

### Determining the T-Cell Subpopulation's MHC-Class I or Class II Restricted Subsets

[0466] The T-cell subpopulations of the TVM or VM composition can be further characterized by determining the subpopulation's MHC Class I or Class II subset restriction response. This is done to determine whether epitope recognition is mediated by CD8+(class I) or CD4+(class II) T-cells. General methods for determining the MHC Class I or Class II response are generally known in the art. A non-limiting exemplary method is found in Weber et al., Clin Cancer Res. 2013 Sep. 15; 19(18): 5079-5091, which is incorporated herein by reference. For example, to determine HLA restriction response, T cells can be pre-incubated with class I or II blocking antibodies for 1 hour before the addition of antigen peptides in an ELISPOT assay using autologous peptide-pulsed PHA blasts as targets with unpulsed PHA blasts as a control. IFN [symbol] -secretion is measured in the presence of each blocking antibody. If, when pre-incubated with a class I blocking antibody, IFN [symbol] -secretion is reduced to background levels then this is indicative of a class I restriction and the epitope recognition is mediated by CD8+ T cells. If, when pre-incubated with a class II blocking antibody, IFN [symbol] -secretion is reduced to background levels then this is indicative of a class II restriction and the epitope recognition is mediated by CD4+ T cells.

[0467] The direct detection of antigen-specific T cells using tetramers of soluble peptide-major histocompatibilty complex (pMHC) molecules is widely used in both basic and clinical immunology. Tetrameric complexes of HLA molecules can be used to stain antigen-specific T cells in FACS analysis. In vitro synthesized soluble HLA-peptide complexes are used as tetrameric complexes to stain antigen specific T cells in FACS analysis (Altman et al., Science 274: 94-96, 1996). T-cell subpopulations specific for TAAs are stained with CD8 fluorescein isothiocyanate (FITC) and with phycoerythrin (PE)-labeled MHC pentamers at various timepoints during in vitro stimulation. Antigen specificity is measured by flow cytometry.

### Correlating Antigenic Activity Through the T-Cell's Corresponding HLA-Allele

[0468] The T-cell subpopulation can be further characterized by correlating antigenic activity through the T-cell subpopulation's corresponding HLA-allele. Correlating antigenic activity through the corresponding HLA-allele can be done using any known method. For example, in some embodiments, a HLA restriction assay is used to determine antigen activity through a corresponding allele. Methods to determine T cell restriction are known in the art and involve inhibition with locus specific antibodies, followed by antigen presentation assays (ELISPOT) with panels of cell lines matched or mismatched at the various loci of interest (see, e.g., (Oseroff et al., J Immunol (2010) 185(2): 943-955; Oseroff et al., J Immunol (2012) 189(2): 679-688; Wang Curr Protocols in immunol (2009) Chap. 20, page 10; Wilson et al., J. Virol. (2001) 75(9): 4195-4207), each independently incorporated herein by reference. Because epitope binding to HLA class II molecules is absolutely necessary (but not sufficient) for T cell activation, data from in vitro HLA binding assays has also been useful to narrow down the possible restrictions (Arlehamn et al., J Immunol (2012b) 188(10):5020-5031). This is usually accomplished by testing a given epitope for binding to the specific HLA molecules expressed in a specific donor and eliminating from further consideration HLA molecules to which the epitope does not bind. To determine the HLA restriction of the identified epitope, T cells can be plated in an IFN-γ ELISPOT assay with TAA peptide pulsed PHA blasts that match at a single allele, measuring the strongest antigen activity, and identifying the corresponding allele.

### Characterizing the T-cell Subpopulation's Immune Effector Subtype Concentration

[0469] The T-cell subpopulation is likely to be made up of different lymphocytic cell subsets, for example, a combination of CD4+ T-cells, CD8+ T-cells, CD3+/CD56+ Natural Killer T-cells (CD3+ NKT), and TCR γδ T-cells (γδ T-cells). In particular, the T-cell subpopulation likely include at least CD4+ T-cells and CD8+ T-cells that have been primed and are capable of targeting a single specific TAA for tumor killing and/or cross presentation. The T-cell subpopulation may further comprise activated γδ T-cells and/or activated CD3+/CD56+ NKT cells capable of mediating anti-tumor responses. Accordingly, the T-cell subpopulation may be further characterized by determining the population of various lymphocytic subtypes, and the further classification of such subtypes, for example, by determining the presence or absence of certain clusters of differentiation (CD) markers, or other cell surface markers, expressed by the cells and determinative of cell subtype.

[0470] In some embodiments, the T-cell subpopulation may be analyzed to determine CD8+ T-cell population, CD4+, T-cell population, γδ T-cell population, NKT-cell population, and other populations of lymphocytic subtypes. For example, the population of CD4+ T-cells within the T-cell subpopulation may be determined, and the CD4+ T-cell subtypes further determined. For example, the CD4+ T-cell population may be determined, and then further defined, for example, by identifying the population of T-helper 1 (Th1), T-helper 2 (Th2), T-helper 17 (Th17), regulatory T cell (Treg), follicular helper T-cell (Tfh), and T-helper 9 (Th9). Likewise, the other lymphocytic subtypes comprising the T-cell subpopulation can be determined and further characterized.

[0471] In addition, the T-cell subpopulation can be further characterized, for example, for the presence, or lack thereof, of one or more markers associated with, for example, maturation or exhaustion. T cell exhaustion (Tex) is a state of dysfunction that results from persistent antigen and inflammation, both of which commonly occur in tumor tissue. The reversal or prevention of exhaustion is a major area of research for tumor immunotherapy. Tex cell populations can be analyzed using multiple phenotypic parameters, either alone or in combination. Hallmarks commonly used to monitor T cell exhaustion are known in the art and include, but are not limited to, programmed cell death-1 (PD-1), CTLA-4/CD152 (Cytotoxic T-Lymphocyte Antigen 4), LAG-3 (Lymphocyte activation gene-3; CD223), TIM-3 (T cell immunoglobulin and mucin domain-3), 2B4/CD244/SLAMF4, CD160, and TIGIT (T cell Immunoreceptor with Ig and ITIM domains).

[0472] The T-cell subpopulations of the described compositions described herein can be subjected to further selection, if desired. For example, a particular T-cell subpopulation for inclusion in a TVM composition described herein can undergo further selection through depletion or enriching for a subpopulation. For example, following priming, expansion, and selection, the cells can be further selected for other cluster of differentiation (CD) markers, either positively or negatively. For example, following selection of for example CD4+ T-cells, the CD4+ T-cells can be further subjected to selection for, for example, a central memory T-cells (Tcm). For example, the enrichment for CD4+ Tcm cells comprises negative selection for cells expression a surface marker present on naïve T cells, such as CD45RA, or positive selection for cells expressing a surface marker present on Tcm cells and not present on naïve T-cells, for example CD45RO, CD62L, CCR7, CD27, CD127, and/or CD44. In addition, the T-cell subpopulations described herein can be further selected to eliminate cells expressing certain exhaustion markers, for example, programmed cell death-1 (PD-1), CTLA-4/CD152 (Cytotoxic T-Lymphocyte Antigen 4), LAG-3 (Lymphocyte activation gene-3; CD223), TIM-3 (T cell immunoglobulin and mucin domain-3), 2B4/CD244/SLAMF4, CD160, and TIGIT (T cell Immunoreceptor with Ig and ITIM domains)

[0473] Methods for characterizing lymphocytic cell subtypes are well known in the art, for example flow cytometry, which is described in Pockley et al., Curr Protoc Toxicol. 2015 Nov. 2; 66:18.8.1-34, which is incorporated herein by reference.

### Methods of Mesenchymal Stem Cell Expansion

[0474] Expansion of mesenchymal stem cells (MSC) can be performed by any method known in the art. Non-limiting exemplary methods for the expansion of mesenchymal stem cells can be found in Hanley et al., Cytotherapy (2013) 15(4): 416-422; Hanley et al., Cytotherapy (2014) 16(8): 1048-1058; Tom et al., U.S. Pat. No. 9,828,586; Tom et al., US2015/0247122; Antwiler US2007/0298497, each of which are incorporated herein by reference.

[0475] MSCs can be enriched and expanded from numerous sources, including bone marrow, cord blood, and adipose tissue, and have the potential to differentiate into chondrocytes, osteoblasts, and adipocytes. When grown under appropriate conditions the tri-lineage potential of these cells is maintained. However, during expansion, the telomeres shorten and unbiased differentiation into the three lineages could become polarized. Therefore, for therapeutic applications, obtaining clinically-relevant numbers of cells with a minimum number of cell passages and doublings is essential.

[0476] The manufacture of MSCs involves culturing whole adherent bone marrow (BM) cells or isolated bone marrow mononuclear cells (BMMNC). This heterogeneous cell population is initially plated in tissue culture flasks and the adherent cells, which contain the MSC progenitors, are passaged to produce a homogeneous population of MSCs that have a similar morphology to fibroblasts. Given the physical properties of MSCs (large size, adherence), expanding clinically-applicable amounts of MSCs can be difficult using conventional tissue culture methods. Alternatively, MSCs can be plated in cell factories and bioreactors for large-scale expansion. One example of a bioreactor includes, but is not limited to, the Quantum Cell Expansion System by Terumo BCT, Lakewood, Colo., USA.

[0477] Generally, isolating and expanding MSCs of the present invention in a bioreactor may involve i) collecting bone marrow from a donor; ii) priming and coating the cell expansion set in the bioreactor; iii) loading bone marrow into the bioreactor; iv) feeding the MSCs; v) harvesting MSCs; vi) performing additional passages; and vii) cryopreservation.

### Collecting Bone Marrow From a Donor

[0478] Bone marrow obtained by iliac crest aspiration is a common source for harvesting mesenchymal stem cells, other progenitor cells, and associated cytokine/growth factors. Because the use of bone marrow aspirate concentrate (BMAC) is currently approved by the United States Food and Drug Administration, it represents one of the few means for acquiring progenitor cells and growth factors for subsequent injection (Afizah et al., Tissue Eng. (2007) 13: 659-666). Bone marrow harvested by iliac crest aspiration can be performed by any method known in the art. Non-limiting exemplary methods for the bone marrow harvesting by iliac crest aspiration can be found in Chahla et al., Arthrosc Tech. (2017); 6 (2): e441-e445, which is incorporated herein by reference. Bone marrow aspiration kits are utilized in the clinical setting for this purpose, which comprise a bone marrow aspiration needle, trochar, a 30-mL syringe and an anticoagulant citrate dextrose solution.

### Priming and Coating the Cell Expansion Set in the Bioreactor

[0479] One day before loading bone marrow into the bioreactor, the disposable expansion set is loaded onto the bioreactor and the system is primed with phosphate buffered saline and the bioreactor is coated with fibronectin. After approximately 18 hours, the fibronectin is washed out with media.

Loading Bone Marrow into the Bioreactor

[0480] Once the bioreactor is primed and coated then 25-40 mL of bone marrow is transferred into a plasma transfer bag and filtered through a 165-225 μm filter. Cells are allowed to adhere to the hollow fibers in the bioreactor for approximately 48-96 hours.

### Feeding the MSCs

[0481] After the cells have adhered for 48-96 hours the lactate levels are measured by removing 2-3 mL of media from the sampling port. Cells are fed continuously with media, which is adjusted according to the glucose and lactate concentration of the media sample and the manufacturer's recommendations. Media is initially fed at a rate of 0.1 mL/min. Glucose and lactate measurements are typically measured twice daily (Aviva Accu-chek meter, Roche Diagnostics and LactatePlus Lactate Meter, Nova Biomedical). Once the lactate concentration reaches 4 mM, the inlet rate is doubled. The cells are ready to harvest 24-48 hours after the lactate levels reach 4 mM with an inlet rate of 0.4 mL/min.

### Harvesting the MSCs

[0482] The lactate level should be above 4 mM for the first passage. To harvest cells, the system is washed with phosphate buffered saline and then the cell inlet bag is filled with 180-200 mL of TrypLE Select. After 15 minutes of incubation, the TrypLE Select and the harvested cells are washed into the cell harvest bag using fresh medium.

### Performing Additional Passages

[0483] After the first passage, 2.0-3.5×10⁷ MSCs are loaded into a new expansion set either in the same bioreactor equipped with a new expansion set or a new bioreactor that is primed and coated as described above. Repeat the feeding step described above. Once the lactate level reaches 8 mM while the inlet rate is 1.5 mL/min for more than 12 hours then the cells are harvested as described above.

### Cryopreservation

[0484] Before cryopreservation, the MSCs are centrifuged at 500×g for 10 minutes and washed with a wash medium containing Plasmalyte (Baxter) and 5% human serum albumin (HSA). The cells are then centrifuged again and the cells are counted and frozen in 85% Plasmalyte, 10% dimethyl sulfoxide (DMSO), and 5% human serum albumin (HSA). Cells are frozen at 2.5×10⁷ cells/ml/vial.

### Further Characterization of the MSC Subpopulation

[0485] The MSC subpopulation for use in the TVM composition of the present invention can be further characterized prior to use or inclusion in the TVM composition. For example, each of the MSC subpopulations may be further characterized by, for example, one or more of i) measuring growth kinetics of MSC expansion; ii) enumerating colony forming units; iii) determining tri-lineage potential; iv) phenotyping; and v) measuring the suppression of T cell proliferation.

### Measuring Growth Kinetics of MSC Expansion

[0486] MSCs are plated in 96-well culture plates at 1×10³ cells/well. Population doubling time is measured during the cell growth log phase using CyQUANT, a fluorescence-based proliferation assay (Invitrogen). The cells are labeled at initiation with the CyQUANT reagent and tested daily for 7 days. Fluorescence is measured using a microplate reader. A standard curve is generated for each sample by plotting known numbers of MSC on 96-well tissue culture plates against fluorescence intensity values obtained after labeling with the CyQUANT reagent.

### Enumerating Colony Forming Units

[0487] An additional test of MSCs is their propensity to form colonies as measured by colony forming units (CFU). MSCs are harvested and immediately plated at 20 cells/cm² in 75 cm² flasks in Alpha-modified Minimum Essential Medium containing ribo- and deoxyribonucleotides supplemented with 10% Fetal Bovine Serum. Colony forming cells are allowed to grow for two weeks and then washed twice with PBS. Cultures are fixed in ethanol for 30 minutes at room temperature and stained with Giemsa stain. Colonies containing at least 40 cells are counted under a stereomicroscope.

### Determining Tri-Lineage Potential

[0488] Methods of measuring the potential of MSCs to differentiate into chondrocytes, osteoblasts, and adipocytes are known in the art. A non-limiting exemplary method is described in Pittinger et al., Science (1999) 284(5411): 143-147, which is incorporated herein by reference. MSCs are cultured under conditions that favor adipogenic, chondrogenic, or osteogenic differentiation. Adipogenic differentiation is induced by treatment with 1-methyl-3-isobutylxanthine, dexamethasone, insulin, and indomethacin. Induction is apparent after 1 to 3 weeks by the accumulation of lipid-rich vacuoles within cells and the expression of peroxisome proliferation-activated receptor [symbol] 2 (PPAR [symbol] 2), lipoprotein lipase (LPL) and the fatty acid binding protein aP2. To promote chondrogenic differentiation, MSCs are centrifuged to form a pelleted micromass and then cultured without serum and with transforming growth factor-β3. Type II collagen can be detected at 10 to 14 days with monoclonal antibody C4F6. The osteogenic differentiation is induced by dexamethasone, β-glycerol phosphate, and ascorbate in the presence of 10% v/v FBS. The MSCs form aggregates and increase expression of alkaline phosphatase and calcium accumulation.

### Phenotyping

[0489] MSCs are directly stained for the positive markers CD73, CD90, and CD105 as well as lineage markers CD45, CD34, CD14, CD19, and HLA-DRII and analyzed on a flow cytometer. Annexin-V and PI antibodies can be used as viability controls, and data analyzed with FlowJo Flow Cytometry software (Treestar, Ashland, Oreg., USA).

### Measuring the Suppression of T-Cell Proliferation

[0490] MSC lines are irradiated and plated in titrated numbers. Peripheral blood mononuclear cells (PBMCs) from healthy donors are labeled with carboxyfluorescein succinimidyl ester (CFSE, Sigma). CFSE-labeled PBMCs are then cultured alone (1:0 PBMC:MSC ratio) for use as a positive control or co-cultured with titrated numbers of MSCs ranging from 1:1 down to a 1:0.05 PBMC:MSC ratio. Soluble anti-human CD28 monoclonal antibodies (RnD Systems, Minneapolis, Minn., USA) are used to stimulate T cell populations. After four days in culture, cells are harvested and stained with anti-huCD4 APC (RnD Systems) to gauge the proliferation of CD4+ T cells by flow cytometry. Data acquisition can be performed with an Accuri C6 Flow Cytometer (BD Biosciences, San Jose, Calif.). CD4+ T cell proliferation (% CD4+/CFSE-low cells) is measured using a negative control gate set with non-stimulated PBMCs co-cultured at a 1:0.05 PBMC:MSC ratio (% CD4+/CFSE-high cells).

### Identifying the TVM or VM Composition Most Suitable for Administration

[0491] Characterization of each T-cell and MSC subpopulation composition allows for the selection of the most appropriate T-cell and MSC subpopulations for inclusion in the TVM or VM composition for any given patient. The MSC subpopulation choice is driven by the choice of T-cell subpopulation due to their lack of expression of Human Leukocyte Antigen (HLA)-class II and co-stimulatory molecules, which limits the immune response of the recipient to these cells. The goal is to match the product with the patient that has the both the highest HLA match and greatest TAA and VAA activity through the greatest number of shared alleles. In some embodiments, the T-cell subpopulations have at least one shared allele or allele combination with TAA activity through that allele or allele combination. In some embodiments, the T-cell subpopulations have at least one shared allele or allele combination with VAA activity through that allele or allele combination. In some embodiments, the T-cell subpopulation has greater than 1 shared allele or allele combination with TAA activity through that allele or allele combination. In some embodiments, the T-cell subpopulation has greater than 1 shared allele or allele combination with VAA activity through that allele or allele combination. In some embodiments, the T-cell subpopulation with the most shared alleles or allele combinations and highest specificity through those shared alleles and allele combinations is provided to a human in need thereof. For example, if T-cell subpopulation 1 is a 5/8 HLA match with the patient with TAA and VAA activity through 3 shared alleles or allele combinations while T-cell subpopulation 2 is a 6/8 HLA match with the patient with TAA and VAA activity through 1 shared allele the skilled practitioner would select T-cell subpopulation 1 as it has TAA and VAA activity through a greater number of shared alleles.

### Testing T-cell Subpopulation Reactivity Against Patient's Tumor

[0492] The cytolytic activity of an activated T-cell subpopulation comprising the TVM composition against a patient's tumor can be evaluated. A method of testing reactivity of T-cell subpopulations against tumor cells are well known. Non-limiting exemplary methods include Jedema et al., Blood (2004) 103:2677-2682; Noto et al., J Vis Exp. 2013; (82): 51105 and Baumgaertner et al., Bio-protocol “Chromium-51 (⁵¹Cr) Release Assay to Assess Human T Cells for Functional Avidity and Tumor Cell Recognition.” (2016) 6(16): e1906. For example, the T-cell subpopulation can be incubated with the patient's tumor and the percent lysis of the tumor cells determined. For example, a biopsy or blood sample will be collected from the patient. Target cells from the patient are fluorescence labeled with carboxyfluorescein succinimidyl ester (CFSE, Invitrogen), peptide-pulsed and incubated with activated T-cell subpopulations at a 40:1 effector-to-target ratios for 6-8 hrs. Ethidium homodimer (Invitrogen) is added after incubation to stain dead cells. Samples are acquired on a BD Fortessa Flow Cytometer. The number of live target cells is determined by gating on carboxyfluorescein succinimidyl ester-positive, ethidium homodimer-negative cells, and used to calculate cytolytic activity as follows: Lysis (%)=100−((live target cells/sample/live target cells control)×100).

[0493] T-cell subpopulations with the highest levels of reactivity against a patient's tumor can be selected for administration to the patient, providing a higher likelihood of successful therapeutic efficacy.

### Banked MSC and T-Cell Subpopulations Directed to Multiple Tumor- and Virus-Associated Antigens

[0494] The establishment of a T-cell and MSC subpopulation bank comprising discrete, characterized T-cell and MSC subpopulations for selection and inclusion in a TVM or VM composition bypasses the need for an immediately available donor and eliminates the wait required for autologous T cell production. Preparing MSC subpopulations by using donors, for example healthy volunteers or cord blood, allows the expansion and banking of MSC subpopulations readily available for administration. Preparing T-cell subpopulations directed to specific, known tumor and virus antigens by using donors, for example healthy volunteers or cord blood, allows the production and banking of T-cell subpopulations readily available for administration. Because the T-cell subpopulations are characterized, the selection of suitable T-cell subpopulations can be quickly determined based on minimal information from the patient, for example HLA-subtype and, optionally TAA expression profile for TAA T-cell subpopulations. From a single donor a T cell and MSC composition can be generated for use in multiple patients who share HLA alleles that have activity towards specific TAAs or VAAs. The T-cell subpopulation bank of the present invention includes a population of T-cell subpopulations which have been characterized as described herein. For example, the T-cell subpopulations of the bank are characterized as to HLA-subtype and one or more of i) TAA or VAA specificity of the T-cell subpopulation; ii) TAA or VAA epitope(s) the T-cell subpopulation is specific to; iii) T-cell subpopulation MHC Class I and Class II restricted subsets; iv) antigenic activity through the T-cell's corresponding HLA-allele; and v) immune effector subtype concentration, for example, the population of effector memory cells, central memory cells, γδ T-cells, CD8+, CD4+, NKT-cell. Because MSC subpopulations do not have co-stimulatory molecules and HLA Class II molecules, as well as low HLA Class I expression they can be used readily in TVM and VM compositions based on the donor source.

[0495] In some embodiments, the present invention is a method of generating a T-cell and MSC subpopulation bank comprising: (i) obtaining eligible donor samples; (ii) generating T-cell subpopulations specific to multiple TAAs and VAAs; (iii) isolating and expanding mesenchymal stem cells (iv) characterizing the T-cell subpopulations; (v) characterizing the MSC subpopulation (vi) cryopreserving the T-cell and MSC subpopulations; and (v) generating a database of T-cell and MSC subpopulation composition characterization data. In some embodiments, the T-cell subpopulations are stored according to their donor source. In some embodiments, the T-cell subpopulations are stored by TAA specificity. In some embodiments, the T-cell subpopulations are stored by VAA specificity. In some embodiments, the T-cell subpopulations are stored by human leukocyte antigen (HLA) subtype and restrictions. In some embodiments the MSC subpopulations are stored by donor source.

[0496] The banked MSC and T-cell subpopulations described herein are used to comprise a TVM composition for administration to a tumor patient following the determination of the patient's HLA subtype and, optionally, TAA expression profile of the patient's tumor. The banked MSC and T-cell subpopulations are used to comprise a VM composition for administration to a patient receiving a HSCT following the determination of the patient's HLA subtype.

### Example 1. Generation of T-Cell Subpopulations from Peripheral Blood Using Multiple-TAA Overlapping Peptide Libraries or Single TAA Overlapping Peptide Libraries

[0497] TAA-specific T-cell lines can be generated from total human blood peripheral mononuclear cells (Step 1) using a multiple-TAA overlapping peptide library approach. Alternatively, T-cell subpopulations can be generated using a TAA-overlapping peptide library to a single TAA, an overlapping peptide library further comprising HLA-restricted TAA epitopes, or specifically selected antigenic epitopes, wherein each T-cell subpopulation is primed and expanded to a single TAA, and subsequently recombined. Matured dendritic cells (DCs) are harvested and used as antigen presenting cells (APCs) and peptide-pulsed with a mix of three peptide libraries for WT1, Survivin, and PRAME (Step 2). T-cells are initially stimulated using a cytokine mix containing one or a combination of: IL-7, IL-12, IL-15, IL-6, and IL-27 (Step 3). Subsequent stimulations (Steps 4 and 5) are performed using irradiated DCs or irradiated phytohemagglutinin (PHA) blasts. Experimental procedures for each of these steps are provided below.

[0498] Step 1. Isolation of Mononuclear Cells

[0499] Heparinized peripheral blood is diluted in an equal volume of warm RPMI 1641 (Invitrogen) or PBS. In a 50 mL centrifuge tube, 10-15 mL of Lymphoprep (Axis-Shield) is overlayed with 20-30 mL of diluted blood. The mixture is centrifuged at 800×g for 20 minutes or 400× g for 40 minutes at ambient temperature, ensuring that acceleration and deceleration are set to “1” to prevent disrupting the interface. 1 mL of plasma aliquots are saved and stored at −80° C. The peripheral blood mononuclear cell (PBMC) interface is harvested into an equal volume of RPMI 1640, then centrifuge at 450× g for 10 minutes at ambient temperature, and the supernatant is aspirated. The pellet is loosened and the cells are resuspended in a volume of RPMI 1640 or PBS that yields an estimated 10×10⁶ cells/mL. An aliquot of cells is removed for counting using 50% red cell lysis buffer or Trypan blue and using a hemocytometer. The PBMCs are saved for DC generation using adherence (Step 2 below) and non-adherent cells are cryopreserved for use at initiation.

[0500] Step 2. Dendritic Cell (DC) Generation

[0501] PBMCs are centrifuged at 400×g for 5 minutes at ambient temperature, and the supernatant is aspirated. The cells are resuspended at approximately 5×10⁶ cells/mL in CellGenix DC medium containing 2 mM of Glutamax (Invitrogen), and the cells are plated in a 6-well plate (2 mL/well). The PBMC non-adherent fraction is removed after 1-2 hours, and the wells are rinsed with 2-5 mL of CellGenix DC medium or PBS and added to the harvested medium/non-adherent fraction. The non-adherent fraction is saved for later cryopreservation. 2 mL of DC medium containing 1,000 U/mL of IL-4 (R&D Systems) and 800 U/mL GM-CSF (CNMC Pharmacy) is added back to the adherent cells. All surrounding wells are filled with approximately 2 mL of sterile water or PBS to maintain the humidity within the plate, and the plate is placed in the incubator at 37° C. and 5% CO₂. On day 3 to 4, the cells are fed with 1,000 U/mL IL-4 and 800 U/mL GM-CSF. On day 5 to 6, the DCs are matured in 2 mL/well of DC medium containing lipopolysaccharide (LPS, Sigma) (30 ng/mL), IL-4 (1,000 U/mL), GM-CSF (800 U/mL), TNF-α (10 ng/mL, R&D Systems), IL-6 (100 ng/mL, CellGenix), and IL-1β (10 ng/mL, R&D Systems). The mature DCs are harvested on day 7 to 8 by gentle resuspension. The cells are counted using a hemocytometer. The DCs are transferred to a 15 mL centrifuge tube and centrifuged for 5 minutes at 400× g at ambient temperature. The supernatant is aspirated, and the pellet is resuspended by finger flicking, and 100 μL of appropriate overlapping peptide libraries mastermix (200 ng/peptide in 200 μL; PRAME, WT1, and Survivin overlapping peptide libraries; JPT Peptide Technologies) per 1-5×10⁶ cells is added to the DCs. The DCs and overlapping peptide libraries are mixed and transferred to the incubator. Alternatively, matured dendritic cells (DCs) are harvested and used as antigen presenting cells (APCs) and peptide-pulsed with single peptide libraries of WT1, Survivin, and PRAMS to generate 3 subpopulations of peptide-pulsed DCs. The mixture is incubated for 60-90 minutes at 37° C. and 5% CO₂.

[0502] Step 3. T-cell Population Initiation

[0503] After pulsing with overlapping peptide libraries, DCs are irradiated at 25 Gy. The DCs are washed with DC medium and centrifuged at 400×g for 5 minutes at ambient temperature. The supernatant is aspirated, and the wash step is repeated twice more. The cells are counted using a hemocytometer. The DCs are resuspended at 2-4×10⁵ cells/mL of CTL medium with 10% human serum (HS, Valley) for initiation. 1 mL of irradiated DCs/well is plated in a 24-well tissue culture treated plate.

[0504] Previously-frozen PBMCs from Step 1 are thawed at 37° C. and diluted in 10 mL of warm medium/1 mL of frozen cells. The PBMCs are centrifuged at 400×g for 5 minutes at ambient temperature and are resuspended in 5-10 mL of medium and a cell count is performed using a hemocytometer. The PBMCs are resuspended at 2×10⁶ cells/mL. DCs and PBMCs are recombined in the plate to stimulate CTL at a 1:10 to 1:5 ratio of DCs:CTL. Cytokines IL-7, IL-15, IL-6, and IL-12 are added to achieve a final concentration of IL-7 (10 ng/mL, R&D Systems)), IL-15 (5 ng/mL, CellGenix), IL-6 (100 ng/mL, CellGenix), and IL-12 (10 ng/mL, R&D Systems). All surrounding wells are filled with approximately 2 mL of PBS to maintain humidity within the plate. The cells are cultured in the incubator at 37° C. and 5% CO₂ for 7 to 8 days. A one half medium change is performed on day 4 to 5, with the wells being split 1:1 if nearly confluent.

[0505] Step 4. Second T-cell Stimulation in 24-Well Plate

[0506] The second stimulation of T-cells is performed using either Overlapping Peptide Library-Pulsed Autologous DCs (Procedure A) or Overlapping Peptide Library-Pulsed Autologous Phytohemagglutinin (PHA) Blasts (Procedure B) as antigen presenting cells.

[0507] Procedure A: Stimulation Using Overlapping Peptide Library-Pulsed Autologous DCs as Antigen Presenting Cells (APCs)

[0508] After pulsing with the appropriate overlapping peptide library (PRAME, WT1, and Survivin overlapping peptide library; JPT Peptide Technologies), DCs are irradiated at 25 Gy. DCs can be pulsed with mixtures of multiple overlapping peptide libraries (Multi-TAA) or with single overlapping peptide libraries and then combined after stimulation. The DCs are washed with DC medium and are centrifuged at 400×g for 5 minutes at ambient temperature. The supernatant is aspirated and the wash step is repeated twice more. The cells are counted using a hemocytometer. The DCs are resuspended at 0.5-2×10⁵ cells/mL of CTL medium with 10% HS (Valley) for initiation. Plate 1 mL of irradiated DCs/well (0.5-2×10⁵ cells) in a 24-well tissue culture treated plate. T-cells are counted using a hemocytometer. The cells are resuspended at 1×10⁶ cells/mL of T-cell medium supplemented with IL-7 (10 ng/mL final concentration, R&D Systems)) and IL-2 (100 U/mL final concentration, Proleukin) and 1 mL is aliquoted per well of the 24-well plate. The cells are cultured in the incubator at 37° C. and 5% CO₂ for 3 to 4 days. The medium is changed with IL-2 (˜100 U/mL final concentration, Proleukin) and cultured for another 3 to 4 days. Cells can be frozen after the second stimulation.

[0509] Procedure B: Stimulation Using Overlapping Peptide Library-Pulsed Autologous Phytohemagglutinin (PHA) Blasts as APCs

[0510] Autologous PHA blasts are harvested on day 7 by gentle resuspension, and cells are counted using a hemocytometer. The PHA blasts are transferred to a 15 mL centrifuge tube and are centrifuged for 5 minutes at 400× g at ambient temperature. The Supernatant is aspirated and the pellet is resuspended by finger flicking. 100 μL of appropriate overlapping peptide library mastermix (200 ng/peptide in 200 μL; PRAME, WT1, and Survivin overlapping peptide library; JPT Peptide Technologies) is added to PHA blasts per 1-10×10⁶ cells. Alternatively, PHA blasts are peptide-pulsed with single peptide libraries of WT1, Survivin, and PRAME to generate 3 subpopulations of peptide-pulsed PHA blasts. The PHA blasts are incubated for 30-60 minutes. The PHA blasts are resuspended in 5-10 mL of medium and irradiated at 50 Gy (or 100 Gy if used in G-rex). The PHA blasts are washed with CTL medium and centrifuged at 400×g for 5 minutes at ambient temperature. The supernatant is aspirated and the washing step is repeated twice more. A cell count is performed using a hemocytometer. The PHA blasts are resuspended at 0.5×10⁶ cells/mL of CTL medium to re-stimulate T-cells at an approximate ratio of 1:1 PHA blasts:T-cell. The T-cells are counted using a hemocytometer. The T-cells are resuspended at 0.5×10⁶ cells/mL of CTL medium supplemented with IL-7 (100 ng/mL final concentration; R&D Systems) and IL-2 (100 U/mL final concentration; Proleukin). One well of only PHA blasts is maintained as an irradiation control. The cells are cultured in the incubator at 37° C. and 5% CO₂ for 3 to 4 days. The medium is changed with IL-2 (100 U/mL final concentration; Proleukin) and the cells are cultured for another 3 to 4 days.

[0511] Step 5. Third T-cell Stimulation in G-Rex10 Using PHA Blasts as APCs

[0512] Autologous PHA blasts are harvested on day 7 by gentle resuspension, and cells are counted using a hemocytometer. The PHA blasts are transferred to a 15 mL centrifuge tube and are centrifuged for 5 minutes at 400× g at ambient temperature. The supernatant is aspirated, and the pellet is resuspended by finger flicking. 100 μL of appropriate overlapping peptid library mastermix (200 ng/peptide in 200 μL; PRAME, WT1, and Survivin overlapping peptide library; JPT Peptide Technologies) is added to PHA blasts per 1-10×10⁶ cells, and the PHA blasts are incubated for 30-60 minutes. Alternatively, PHA blasts are peptide-pulsed with single peptide libraries of WT1, Survivin, and PRAME to generate 3 subpopulations of peptide-pulsed PHA blasts. The PHA blasts are resuspended in 5-10 mL of medium and irradiated at 50 Gy (or 100 Gy if used in G-Rex). The PHA blasts are washed with CTL medium and are centrifuged at 400×g for 5 minutes at ambient temperature. The supernatant is aspirated, and the washing step is repeated twice more. Cells are counted using a hemocytometer. The PHA blasts are resuspended at 0.5×10⁶ cells/mL of CTL medium to re-stimulate T-cells at an approximate ratio of 1:1 PHA blasts'. 10 mL of cell suspension is added in the G-Rex10 and 1 mL/well (0.5×10⁶ PHA blasts) in the 24-well control plate. The T-cells were counted using a hemocytometer. The T-cells are resuspended at 05×10⁶ cells/mL of CTL medium, and 10 mL (5×10⁶ CTLs) was added in the G-Rex10 and 1 mL/well (0.5×10⁶ CTLs) in the 24-well control plate. The medium was supplemented with IL-7 (10 ng/mL final concentration; R&D Systems) and IL-2 (100 U/mL final concentration; Proleukin), and the cells are cultured in the incubator at 37° C. and 5% CO₂ for 3 to 4 days. One well of the 24 well plate is left with PHA blasts only as an irradiation control. The medium is changed with IL-2 (100 U/mL final concentration; Proleukin), and the cells are cultured for an additional 3 to 4 days.

### Example 2. Generation of MSC Subpopulations

### Step 1. Donor Screening

[0513] The starting material for the production of the present MSCs in this example is a bone marrow aspirate (“BMA”) obtained from a human donor. The BMA donor is screened for acceptance by testing a sample of blood against a panel of infectious diseases, and is accepted if the donor meets all criteria.

### Step 2. BMA Collection

[0514] Collection of the BMA takes place at an outpatient surgical center (e.g., 7 days after blood sample collection is performed). The donor is placed in the prone position and the bone marrow aspiration needle is inserted into the posterior iliac crest. The BMA collection procedure uses two syringes each containing 5 mL of 1,000 USP units/mL heparin sodium, which acts as an anticoagulant. As a result, the BMA material contains a small concentration (10,000 U/BMA) of heparin sodium. Up to 60 ml bone marrow is aspirated from the insertion site (from each side of the iliac crest), for example from 100 ml to 120 ml bone marrow in total.

Step 3. Isolation of Nucleated Bone Marrow Cells from BMA

[0515] The first step (day 1) in the isolation and expansion of human mesenchymal stem cells (hMSCs) involves the isolation of nucleated bone marrow cells from the BMA. A CytoMate® Cell Washer (Baxter Healthcare Corp., Deerfield, Ill.) connected with a fluid transfer set is used to transfer a Plasma-Lyte®A (Baxter, Deerfield, Ill.) and Hespan formulation to the BMA by using a Terumo sterile tube welder to fuse the BMA bag tubing lines together with the fluid transfer set.

[0516] In some embodiments of the present application, other cell washing or purification machines or techniques are used instead of a Cytomate Cell Washer; when the Cytomate is referred to herein, it is noted that any suitable replacement device for cell washing or purification machines or techniques may be employed instead. Hespan is utilized to agglutinate, sediment, and separate the majority of the red blood cells (RBCs) from the bone marrow nucleated cells. Using the “Fluid Transfer” program on the CytoMate® (Baxter, Deerfield, Ill.), the Plasma-Lyte®A (Baxter, Deerfield, Ill.) and Hespan formulation (6% Hetastarch) is then transferred into the BMA bag and the RBCs are allowed to settle for approximately 60 to 90 minutes until a distinct separation appears between the nucleated bone marrow cells and the RBCs. The nucleated bone marrow cells (top layer) are isolated from the BMA bag using a Fenwal plasma extractor to press the upper nucleated bone marrow cell layer into a transfer pack. The isolated nucleated bone marrow cells (INBMCs) are then transferred to the CytoMate® and processed by concentrating and washing the cells with culture medium (DMEM w/4 mM L-alanyl-L-glutamine+10% FBS). INBMCs are counted using a Hematology Analyzer (Beckman Coulter).

### Step 4. Isolation of MSCs

[0517] Following the cell count, the INBMCs are diluted to the target seeding concentration (e.g., 925×10⁶ INBMCs per 55 ml) and transferred to a 1.5 L culture medium bag using the “Transfer Volume” program on the CytoMate® to obtain the “Media Cell Suspension”. The “Media Cell Suspension” is used to seed the INBMCs into a CO² primed Nunc ten-stack cell factory (CF) at about 5,900 cells±about 20% per cm2 of growing surface. The CF is then placed in an incubator set at about 37±1° C. and about 5±2% CO², and ambient relative humidity. This is the primary culture (P0). After the initial seeding of the INBMCs, MSCs attach to the tissue culture plastic and grow to form a primary adherent population.

### Step 5. Feeds

[0518] Non-adherent cells are aspirated away during a feed change. The feed is an addition of 1.5 L of fresh culture medium to replace the existing culture medium (“spent medium”) that has been depleted of nutrients from cells growing in culture. A feed is performed every 3-4 days. During each feed, the CF is examined for integrity and appearance.

### Step 6. First Passage

[0519] After approximately about 21±3 days in culture, the primary culture (P0) is expanded (e.g., from one CF to approximately six CFs, or, optionally from one CF to approximately eight CFs) for the first passage (P1).

### Step 7. Trypsinizing

[0520] The spent medium in each CF is drained via gravity flow into an empty medium bag that is attached (e.g., sterile welded such as using a Terumo Sterile Tubing Welder) to a CF tubing set. After the CF has been completely drained, the “spent medium” bag is removed.

[0521] A “Stop Solution” bag and a “Trypsin-EDTA (0.05% Trypsin, 0.53 mM EDTA)” bag are attached (e.g., sterile welded) to the CF tubing set. Trypsin-EDTA approximately 400 mL) is added to the CF via gravity flow. Once the “Trypsin-EDTA” bag has been emptied, the CF is placed into a 37±1° C. and 5±2% CO² incubator for trypsinization.

[0522] Each CF is trypsinized for up to 30 minutes (e.g., up to about 15 to about 30 min or any range in-between). During the trypsinization period, the CFs are observed approximately every 8 minutes using an inverted microscope to determine the percentage of cells that have detached. When the percentage of detached cells is estimated to be >about 90%, the trypsinization is stopped by adding 100 mL of media “stop solution” (e.g., DMEM containing 10% FBS) into the CF via gravity flow. The duration of the trypsinization is recorded.

### Step 8. Washing

[0523] The trypsinized-stopped cell suspension is drained via gravity flow into a 600 mL transfer pack that is attached to a CF tubing set.

[0524] The trypsinized-stopped cell suspension is then washed using the CytoMate®.

### Step 9. Seeding

[0525] The hMSCs are counted on a Guava Personal Cytometer™ (Guava Technologies).

[0526] An amount of cells (e.g., about 37.5×10⁶ cells or about 37.5×10⁶±about 5%, about 10%, or about 20% cells) are added to 1.5 L culture medium bags on the CytoMate®. The culture medium bags now containing cells are then used to seed a corresponding number of CFs via sterile tubing connections (e.g. at about 5,900 cells/per cm²±about 5%, about 10%, about 15%, or about 20% per cm²). The seeded CFs are then placed in an incubator set at about 37±1° C. and about 5±2% CO², and ambient relative humidity for approximately 14±2 days, with feeds approximately every 3-4 days, as set forth in Example 7.

### Step 10. Second Passage

[0527] After approximately 14±2 days in culture, the CF (e.g., six-CF, or eight-CF) P1 cultures are expanded (e.g., into 36 CFs) for the second passage (P2).

[0528] The trypsinized-stopped cell suspensions of several CFs can be pooled before washing.

### Step 11. Harvest

[0529] After approximately 14±2 days in culture, the cultured hMSCs are harvested (e.g., after about 42 to about 56 days total over two passages). Each CF is processed as set forth above using Plasma-Lyte®. A containing about 1% Human Serum Albumin as a stop solution. The trypsinized-stopped cell suspensions of several CFs can be pooled before washing.

### Example 3. Generation of T-Cell Subpopulations from Peripheral Blood Using Multiple-VAA PepMixes

[0530] VAA-specific T-cell lines can be generated from total human blood peripheral mononuclear cells (Step 1). Matured dendritic cells (DCs) are harvested and used as antigen presenting cells (APCs) and peptide-pulsed with a mix of three peptide libraries for IE-1, pp65, EBNA1, LMP1, LMP2, Hexon, Penton, LT, VP-1, MP1, NP1, N, F, U14, and U90 (Step 2). T-cells are initially stimulated using a cytokine mix containing IL-7, IL-12, IL-15, IL-6, and IL-27 (Step 3). Subsequent stimulations (Steps 4 and 5) are performed using irradiated DCs or irradiated phytohemagglutinin (PHA) blasts. Experimental procedures for each of these steps are provided below.

### Step 1. Isolation of Mononuclear Cells

[0531] Heparinized peripheral blood is diluted in an equal volume of warm RPMI 1641 (Invitrogen) or PBS. In a 50 mL centrifuge tube, 10-15 mL of Lymphoprep (Axis-Shield) is overlaid with 20-30 mL of diluted blood. The mixture is centrifuged at 800×g for 20 minutes or 400× g for 40 minutes at ambient temperature, ensuring that acceleration and deceleration are set to “1” to prevent disrupting the interface. 1 mL of plasma aliquots are saved and stored at −80° C. The peripheral blood mononuclear cell (PBMC) interface is harvested into an equal volume of RPMI 1640, then centrifuge at 450× g for 10 minutes at ambient temperature, and the supernatant is aspirated. The pellet is loosened and the cells are resuspended in a volume of RPMI 1640 or PBS that yields an estimated 10×10⁶ cells/mL. An aliquot of cells is removed for counting using 50% red cell lysis buffer or Trypan blue and using a hemocytometer. The PBMCs are saved for DC generation using adherence (Step 2 below) and non-adherent cells are cryopreserved for use at initiation.

### Step 2. Dendritic Cell (DC) Generation

[0532] PBMCs are centrifuged at 400×g for 5 minutes at ambient temperature, and the supernatant is aspirated. The cells are resuspended at approximately 5×10⁶ cells/mL in CellGenix DC medium containing 2 mM of Glutamax (Invitrogen), and the cells are plated in a 6-well plate (2 mL/well). The PBMC non-adherent fraction is removed after 1-2 hours, and the wells are rinsed with 2-5 mL of CellGenix DC medium or PBS and added to the harvested medium/non-adherent fraction. The non-adherent fraction is saved for later cryopreservation. 2 mL of DC medium containing 1,000 U/mL of IL-4 (R&D Systems) and 800 U/mL GM-CSF (CNMC Pharmacy) is added back to the adherent cells. All surrounding wells are filled with approximately 2 mL of sterile water or PBS to maintain the humidity within the plate, and the plate is placed in the incubator at 37° C. and 5% CO². On day 3 to 4, the cells are fed with 1,000 U/mL IL-4 and 800 U/mL GM-CSF. On day 5 to 6, the DCs are matured in 2 mL/well of DC medium containing lipopolysaccharide (LPS, Sigma) (30 ng/mL), IL-4 (1,000 U/mL), GM-CSF (800 U/mL), TNF-α (10 ng/mL, R&D Systems), IL-6 (100 ng/mL, CellGenix), and IL-1β (10 ng/mL, R&D Systems). The mature DCs are harvested on day 7 to 8 by gentle resuspension. The cells are counted using a hemocytometer. The DCs are transferred to a 15 mL centrifuge tube and centrifuged for 5 minutes at 400× g at ambient temperature. The supernatant is aspirated, and the pellet is resuspended by finger flicking, and 100 μL of appropriate overlapping peptide library mastermix (200 ng/peptide in 200 μL; IE-1, pp65, EBNA1, LMP1, LMP2, Hexon, Penton, LT, VP-1, MP1, NP1, N, F, U14, and U90 overlapping peptide libraries; JPT Peptide Technologies) per 1-5×10⁶ cells is added to the DCs. The DCs and overlapping peptide libraries are mixed and transferred to the incubator. The mixture is incubated for 60-90 minutes at 37° C. and 5% CO2.

### Step 3. T-cell Population Initiation

[0533] After pulsing with overlapping peptide libraries, DCs are irradiated at 25 Gy. The DCs are washed with DC medium and centrifuged at 400×g for 5 minutes at ambient temperature. The supernatant is aspirated, and the wash step is repeated twice more. The cells are counted using a hemocytometer. The DCs are resuspended at 2-4×10⁵ cells/mL of CTL medium with 10% human serum (HS, Valley) for initiation. 1 mL of irradiated DCs/well is plated in a 24-well-tissue culture treated plate.

[0534] Previously-frozen PBMCs from Step 1 are thawed at 37° C. and diluted in 10 mL of warm medium/1 mL of frozen cells. The PBMCs are centrifuged at 400×g for 5 minutes at ambient temperature and are resuspended in 5-10 mL of medium and a cell count is performed using a hemocytometer. The PBMCs are resuspended at 2×106 cells/mL. DCs and PBMCs are recombined in the plate to stimulate CTL at a 1:10 to 1:5 ratio of DCs:CTL. Cytokines IL-7, IL-15, IL-6, and IL-12 are added to achieve a final concentration of IL-7 (10 ng/mL, R&D Systems)), IL-15 (5 ng/mL, CellGenix), IL-6 (100 ng/mL, CellGenix), and IL-12 (10 ng/mL, R&D Systems). All surrounding wells are filled with approximately 2 mL of PBS to maintain humidity within the plate. The cells are cultured in the incubator at 37° C. and 5% CO² for 7 to 8 days. A one-half medium change is performed on day 4 to 5, with the wells being split 1:1 if nearly confluent.

### Step 4. Second T-cell Stimulation in 24-Well Plate

[0535] The second stimulation of T-cells is performed using either Overlapping Peptide Library-Pulsed Autologous DCs (Procedure A) or Overlapping Peptide Library-Pulsed Autologous

[0536] Phytohemagglutinin (PHA) Blasts (Procedure B) as antigen presenting cells.

### Procedure A: Stimulation Using Overlapping Peptide Library-Pulsed Autologous DCs as Antigen Presenting Cells (APCs)

[0537] After pulsing with the appropriate overlapping peptide libraries (IE-1, pp65, EBNA1, LMP1, LMP2, Hexon, Penton, LT, VP-1, MP1, NP1, N, F, U14, and U90 overlapping peptide libraries; JPT Peptide Technologies), DCs are irradiated at 25 Gy. The DCs are washed with DC medium and are centrifuged at 400×g for 5 minutes at ambient temperature. The supernatant is aspirated and the wash step is repeated twice more. The cells are counted using a hemocytometer. The DCs are resuspended at 0.5-2×10⁵ cells/mL of CTL medium with 10% HS (Valley) for initiation. Plate 1 mL of irradiated DCs/well (0.5-2×10⁵ cells) in a 24-well tissue culture treated plate. T-cells are counted using a hemocytometer. The cells are resuspended at 1×10⁶ cells/mL of T-cell medium supplemented with IL-7 (10 ng/mL final concentration, R&D Systems)) and IL-2 (100 U/mL final concentration, Proleukin) and 1 mL is aliquoted per well of the 24-well plate. The cells are cultured in the incubator at 37° C. and 5% CO2 for 3 to 4 days. The medium is changed with IL-2 (˜100 U/mL final concentration, Proleukin) and cultured for another 3 to 4 days. Cells can be frozen after the second stimulation.

### Procedure B: Stimulation Using Overlapping Peptide Library-Pulsed Autologous Phytohemagglutinin (PHA) Blasts as APCs

[0538] Autologous PHA blasts are harvested on day 7 by gentle resuspension, and cells are counted using a hemocytometer. The PHA blasts are transferred to a 15 mL centrifuge tube and are centrifuged for 5 minutes at 400× g at ambient temperature. The Supernatant is aspirated and the pellet is resuspended by finger flicking. 100 μL of appropriate PepMix Mastermix (200 ng/peptide in 200 μL; IE-1, pp65, EBNA1, LMP1, LMP2, Hexon, Penton, LT, VP-1, MP1, NP1, N, F, U14, and U90 overlapping peptide libraries; JPT Peptide Technologies) is added to PHA blasts per 1-10×10⁶ cells. The PHA blasts are incubated for 30-60 minutes. The PHA blasts are resuspended in 5-10 mL of medium and irradiated at 50 Gy (or 100 Gy if used in G-rex). The PHA blasts are washed with CTL medium and centrifuged at 400×g for 5 minutes at ambient temperature. The supernatant is aspirated and the washing step is repeated twice more. A cell count is performed using a hemocytometer. The PHA blasts are resuspended at 0.5×10⁶ cells/mL of CTL medium to re-stimulate T-cells at an approximate ratio of 1:1 PHA blasts:T-cell. The T-cells are counted using a hemocytometer. The T-cells are resuspended at 0.5×10⁶ cells/mL of CTL medium supplemented with IL-7 (100 ng/mL final concentration; R&D Systems) and IL-2 (100 U/mL final concentration; Proleukin). One well of only PHA blasts is maintained as an irradiation control. The cells are cultured in the incubator at 37° C. and 5% CO² for 3 to 4 days. The medium is changed with IL-2 (100 U/mL final concentration; Proleukin) and the cells are cultured for another 3 to 4 days.

### Step 5. Third T-cell Stimulation in G-Rex10 Using PHA Blasts as APCs

[0539] Autologous PHA blasts are harvested on day 7 by gentle resuspension, and cells are counted using a hemocytometer. The PHA blasts are transferred to a 15 mL centrifuge tube and are centrifuged for 5 minutes at 400× g at ambient temperature. The supernatant is aspirated, and the pellet is resuspended by finger flicking. 100 μL of appropriate overlapping peptide library mastermix (200 ng/peptide in 200 μL; IE-1, pp65, EBNA1, EBNA2, LMP1, LMP2, Hexon, Penton, LT, VP-1, MP1, NP1, N, F, U14, and U90 overlapping peptide libraries; JPT Peptide Technologies) is added to PHA blasts per 1-10×10⁶ cells, and the PHA blasts are incubated for 30-60 minutes. The PHA blasts are resuspended in 5-10 mL of medium and irradiated at 50 Gy (or 100 Gy if used in G-Rex). Alternatively, PHA blasts are peptide-pulsed with single peptide libraries of selected viral antigens to generate multiple subpopulations of peptide-pulsed PHA blasts. The PHA blasts are washed with CTL medium and are centrifuged at 400×g for 5 minutes at ambient temperature. The supernatant is aspirated, and the washing step is repeated twice more. Cells are counted using a hemocytometer. The PHA blasts are resuspended at 0.5×106 cells/mL of CTL medium to re-stimulate T-cells at an approximate ratio of 1:1 PHA blasts. 10 mL of cell suspension is added in the G-Rex10 and 1 mL/well (0.5×10⁶ PHA blasts) in the 24-well control plate. The T-cells were counted using a hemocytometer. The T-cells are resuspended at 05×10⁶ cells/mL of CTL medium, and 10 mL (5×10⁶ CTLs) was added in the G-Rex10 and 1 mL/well (0.5×10⁶ CTLs) in the 24-well control plate. The medium was supplemented with IL-7 (10 ng/mL final concentration; R&D Systems) and IL-2 (100 U/mL final concentration; Proleukin), and the cells are cultured in the incubator at 37° C. and 5% CO² for 3 to 4 days. One well of the 24 well plate is left with PHA blasts only as an irradiation control. The medium is changed with IL-2 (100 U/mL final concentration; Proleukin), and the cells are cultured for an additional 3 to 4 days.

[0540] This specification has been described with reference to embodiments of the invention. The invention has been described with reference to assorted embodiments, which are illustrated by the accompanying Examples. The invention can, however, be embodied in different forms and should not be construed as limited to the embodiments set forth herein. Given the teaching herein, one of ordinary skill in the art will be able to modify the invention for a desired purpose and such variations are considered within the scope of the invention.

1. A cell composition comprising:
one or more primed and expanded T-cell subpopulations having specificity for one or more tumor associated antigens;
(ii) one or more primed and expanded T-cell subpopulations having specificity for one or more viral associated antigens; and
(iii) one or more mesenchymal stem cell (MSC) subpopulations.

2. (canceled)

3. The cell composition of claim 1, wherein the one or more tumor associated antigens are selected from the group consisting of WT1, PRAME, Survivin, NY-ESO-1, MAGE-A3, MAGE-A4, Pr3, Cyclin A1, SSX2, Neutrophil Elastase (NE), and combination thereof.

4. (canceled)

5. The cell composition of claim 1, wherein the one or more virus associated antigens are selected from the group consisting of immediate-early protein 1 (IE-1), immediate-early protein 2 (IE-2), 65 kDa phosphoprotein (pp65), EBNA-leader protein (EBNA-LP), EBNA1, EBNA2, EBNA3a, EBNA3b, EBNA3c, latent membrane protein 1 (LMP1), latent membrane protein 2 (LMP2), envelope glycoprotein GP350/GP340, BARF1 mRNA export factor EB2 (BMLF1), DNA polymerase processivity factor (BMRF1), trans-activator protein (BZLF1), hexon protein of Human adenovirus 3 (HAdV-3), penton protein of Human adenovirus 5 (HAdV-5), capsid protein VP-1, capsid protein VP-2, large T antigen, small T antigen, U14, U54, U90, fusion glycoprotein (F), major surface glycoprotein G, small hydrophobic protein (SH), nucleocapsid (N) protein, matrix protein (MP) 1, matrix protein (MP) 2, nucleocapsid protein (NP) 1, neuroaminidase, hemagglutinin (HA), protein E4, protein E5, protein E6, protein E7, late major capsid protein (L) 1, replication protein E1, replication protein E2, envelope glycoprotein gp160 (Env), Gag polyprotein, Nef protein, Pol polyprotein, and a combination thereof.

6. (canceled)

7. The cell composition of claim 1, wherein the one or more virus associated antigens comprise:
(a) a viral associated antigen selected from the group consisting of IE-1, pp65, and a combination thereof;
(b) a viral associated antigen selected from the group consisting of EBNA1, EBNA2 LMP1, LMP2, BARF1, BZLF1, and a combination thereof;
(c) a viral associated antigen selected from the group consisting of Hexon, Penton, and a combination thereof;
(d) a viral associated antigen selected from the group consisting of LT, VP-1, and a combination thereof;
(e) a viral associated antigen selected from the group consisting of MP1, NP1, and a combination thereof;
(f) a viral associated antigen selected from the group consisting of N, F, and a combination thereof; and
(g) a viral associated antigen selected from the group consisting of U14, U90, and a combination thereof.

8. The cell composition of claim 1, wherein the MSC subpopulation is from bone marrow or cord blood, and wherein the MSC subpopulation optionally comprises greater than 95% of cells having a positive antigen expression pattern CD29, CD105, CD73, and CD90, and less than 2% of cells having an antigen expression pattern CD45, CD34, CD3, CD14, CD19, and HLA-DR.

9. (canceled)

10. The cell composition of claim 1, wherein:
(a) the T-cell subpopulations of (i) are from an allogeneic donor; and/or
(b) the T-cell subpopulations of (ii) are from an allogeneic donor.

11-15. (canceled)

16. A method of treating a malignancy or tumor in a subject in need thereof, comprising administering an effective amount of the cell composition of claim 1 to the subject.

17. The method of claim 16, wherein:
the malignancy is a hematological malignancy or a solid tumor.

18-20. (canceled)

21. The method of claim 16, wherein the subject is receiving or has received an hematopoietic stem cell transplantation (HSCT).

22. A cell composition comprising:
(i) one or more primed and expanded T-cell subpopulations having specificity for one or more viral associated antigens; and
(ii) one or more mesenchymal stem cell (MSC) subpopulations.

23. The cell composition of claim 22, wherein the one or more virus associated antigens are selected from the group consisting of immediate-early protein 1 (IE-1), immediate early protein 2 (IE-2), 65 kDa phosphoprotein (pp65), EBNA-leader protein (EBNA-LP), EBNA1, EBNA2, EBNA3a, EBNA3b, EBNA3c, latent membrane protein 1 (LMP1), latent membrane protein 2 (LMP2); envelope glycoprotein GP350/GP340, BARF1 mRNA export factor EB2 (BMLF1), DNA polymerase processivity factor (BMRF1), trans-activator protein (BZLF1), hexon protein of Human adenovirus 3 (HAdV-3), penton protein of Human adenovirus 5 (HAdV-5), capsid protein VP-1, capsid protein VP-2, large T antigen, small T antigen, U14, U54, U90, fusion glycoprotein (F), major surface glycoprotein G, small hydrophobic protein (SH), nucleocapsid (N) protein, matrix protein (MP) 1, matrix protein (MP) 2, nucleocapsid protein (NP) 1, neuroaminidase, hemagglutinin (HA), protein E4, protein E5, protein E6, protein E7, late major capsid protein (L) 1, replication protein E1, replication protein E2, envelope glycoprotein gp160 (Env), Gag polyprotein, Nef protein, Pol polyprotein, and a combination thereof.

24. (canceled)

25. The cell composition of claim 22, wherein the one or more virus associated antigens comprise:
(a) a viral associated antigen selected from the group consisting of IE-1, pp65, and a combination thereof;
(b) a viral associated antigen selected from the group consisting of EBNA1, EBNA2, LMP1, LMP2, BARF1, BZLF1, and a combination thereof;
(c) a viral associated antigen selected from the group consisting of Hexon, Penton, and a combination thereof;
(d) a viral associated antigen selected from the group consisting of LT, VP-1, and a combination thereof;
(e) a viral associated antigen selected from the group consisting of MP1, NP1, and a combination thereof;
(f) a viral associated antigen selected from the group consisting of N, F, and a combination thereof; and
(g) a viral associated antigen selected from the group consisting of U14, U90, and a combination thereof.

26. The cell composition of claim 22, wherein the MSC subpopulation is from bone marrow or cord blood, and wherein the MSC subpopulation optionally comprises greater than 95% of cells having a positive antigen expression pattern CD29, CD105, CD73, and CD90, and less than 2% of cells having an antigen expression pattern CD45, CD34, CD3, CD14, CD19, and HLA-DR.

27. (canceled)

28. The cell composition of claim 22, wherein:
(a) the T-cell subpopulations are from an allogeneic donor and/or;
(b) the T-cell subpopulations are from cord blood.

29-30. (canceled)

31. A method of treating a non-malignant indication in a subject in need thereof, comprising administering an effective amount of the cell composition of claim 22 to the subject.

32. The method of claim 31, wherein:
the non-malignant indications is an autoimmune disease, a metabolic disorder, or a primary immune deficiency disorder.

33-35. (canceled)

36. The method of claim 31, wherein the subject is receiving or has received an hematopoietic stem cell transplantation (HSCT).

37. A method of treating a malignancy or tumor in a subject in need thereof, comprising:
(i) determining a human leukocyte antigen (HLA) subtype of the subject;
(ii) diagnosing a malignancy or tumor type of the subject;
(iii) identifying two or more tumor associated antigens associated with the tumor type for targeting with a tumor associated antigen (TAA)-specific T-cell subpopulation;
(iv) selecting at least one banked T-cell subpopulation for each targeted TAA, wherein the T-cell subpopulation selected has at least one shared allele or allele combination with the targeted TAA;
(v) identifying one or more viral associated antigens for targeting with viral associated antigen (VAA)-specific T-cell subpopulations;
(vi) selecting at least one banked T-cell subpopulation for each targeted VAA, wherein the T-cell subpopulation selected has at least one shared allele or allele combination with the targeted VAA;
(vii) selecting at least one banked mesenchymal stem cell (MSC) population;
(viii) combining each selected banked T-cell subpopulation and MSC population to create a cell composition; and
(ix) administering an effective amount of the cell composition to the subject.

38. A method of selecting a therapy for treating a malignancy or tumor in a subject in need thereof, comprising:
(i) determining a human leukocyte antigen (HLA) subtype of the subject;
(ii) determining a tumor associated antigen (TAA) expression profile of the malignancy or tumor;
(iii) identifying two or more tumor associated antigens expressed by the tumor for targeting with TAA-specific T-cell subpopulations;
(iv) selecting one banked T-cell subpopulation for each targeted TAA, wherein the T-cell subpopulation selected has at least one shared allele or allele combination with the targeted TAA;
(v) identifying one or more viral associated antigens for targeting with viral associated antigen (VAA)-specific T-cell subpopulations;
(vi) selecting at least one banked T-cell subpopulation for each targeted VAA, wherein the T-cell subpopulation selected has at least one shared allele or allele combination with the targeted VAA; and
(vii) selecting at least one banked mesenchymal stem cell (MSC) population.

39. A method of treating a non-malignant indication in a subject in need thereof, comprising:
(i) determining a human leukocyte antigen (HLA) subtype of the subject;
(ii) identifying one or more viral associated antigens for targeting with viral associated antigen (VAA)-specific T-cell subpopulations;
(iii) selecting at least one banked T-cell subpopulation for each targeted VAA, wherein the T-cell subpopulation selected has at least one shared allele or allele combination with the targeted VAA;
(iv) selecting at least one banked mesenchymal stem cell (MSC) population;
(v) combining each selected banked T-cell subpopulation and MSC population to create a T-cell/mesenchymal stem cell composition; and
(vi) administering an effective amount of the T-cell/mesenchymal stem cell composition to the subject.

40. (canceled)

41. A bank of T-cell subpopulations and mesenchymal stem cells (MSC) subpopulations comprising:
(i) one or more primed and expanded T-cell subpopulations having specificity for one or more tumor associated antigens;
(ii) one or more primed and expanded T-cell subpopulations having specificity for one or more viral associated antigens; and
(iii) one or more mesenchymal stem cell (MSC) subpopulations.

42. The bank of T-cell subpopulations and MSC subpopulations of claim 41, wherein:
the T-cell subpopulations of (i) or (ii) are from an allogeneic donor.

44-45. (canceled)

46. The T-cell composition of claim 10, wherein each of the T-cell subpopulations is primed and expanded using a group of peptides comprising peptides specific to each tumor associated antigen that are HLA-restricted to at least one of the donor's HLA-A alleles, one of the donor's HLA-B allele, and one of the donor's HLA-DR alleles.

47. (canceled)

48. The T-cell composition of claim 46, wherein:
(a) the HLA-A alleles are selected from a group comprising HLA-A*01, HLA-A*02:01, HLA-A*03, HLA-A*11:01, HLA-A*24:02, HLA-A*26, and HLA-A*68:01;
(b) the HLA-B alleles are selected from a group comprising HLA-B*07:02, HLA-B*08, HLA-B*15:01 (B62), HLA-B*18, HLA-B*27:05, HLA-B*35:01, and HLA-B*58:02; or
(c) the HLA-DR alleles are selected from a group comprising HLA-DRB1*0101, HLA-DRB1*0301 (DR17), HLA-DRB1*0401 (DR4Dw4), HLA-DRB1*0701, HLA-DRB1*1101, and HLA-DRB1*1501 (DR2b).

49-66. (canceled)

67. The T-cell composition of claim 28, wherein each of the T-cell subpopulations is primed and expanded using a group of peptides comprising peptides specific to each viral associated antigen that are HLA-restricted to at least one of the donor's HLA-A alleles, one of the donor's HLA-B allele, and one of the donor's HLA-DR alleles.

68. (canceled)

69. The T-cell composition of claim 67, wherein:
(a) the HLA-A alleles are selected from a group comprising HLA-A*01, HLA-A*02:01, HLA-A*03, HLA-A*11:01, HLA-A*24:02, HLA-A*26, and HLA-A*68:01;
(b) the HLA-B alleles are selected from a group comprising HLA-B*07:02, HLA-B*08, HLA-B*15:01 (B62), HLA-B*18, HLA-B*27:05, HLA-B*35:01, and HLA-B*58:02, and/or
(c) the HLA-DR alleles are selected from a group comprising HLA-DRB1*0101, HLA-DRB1*0301 (DR17), HLA-DRB1*0401 (DR4Dw4), HLA-DRB1*0701, HLA-DRB1*1101, and HLA-DRB1*1501 (DR2b).

70-83. (canceled)

The application's sequence listing, which the Patent Office published only in electronic form, follows.

SEQUENCE LISTING (3118 sequences)

SEQ ID NO: 1 - protein, 449 aa, Homo sapiens
MGSDVRDLNALLPAVPSLGGGGGCALPVSGAAQWAPVLDFAPPGASAYGSLGGPAPPPAPPPPPPPPPHSFIKQEPSWGGAEPHEEQCLSAFTVHFSGQFTGTAGACRYGPFGPPPPSQASSGQARMFPNAPYLPSCLESQPAIRNQGYSTVTFDGTPSYGHTPSHHAAQFPNHSFKHEDPMGQQGSLGEQQYSVPPPVYGCHTPTDSCTGSQALLLRTPYSSDNLYQMTSQLECMTWNQMNLGATLKGVAAGSSSSVKWTEGQSNHSTGYESDNHTTPILCGAQYRIHTHGVFRGIQDVRRVPGVAPTLVRSASETSEKRPFMCAYPGCNKRYFKLSHLQMHSRKHTGEKPYQCDFKDCERRFSRSDQLKRHQRRHTGVKPFQCKTCQRKFSRSDHLKTHTRTHTGKTSEKPFSCRWPSCQKKFARSDELVRHHNMHQRNMTKLQLAL

SEQ ID NO: 2 - protein, 11 aa, Homo sapiens
TSEKRPFMCAY

SEQ ID NO: 3 - protein, 11 aa, Homo sapiens
STVTFDGTPSY

SEQ ID NO: 4 - protein, 11 aa, Homo sapiens
HTTPILCGAQY

SEQ ID NO: 5 - protein, 11 aa, Homo sapiens
ESQPAIRNQGY

SEQ ID NO: 6 - protein, 11 aa, Homo sapiens
GSQALLLRTPY

SEQ ID NO: 7 - protein, 11 aa, Homo sapiens
HSRKHTGEKPY

SEQ ID NO: 8 - protein, 10 aa, Homo sapiens
FTGTAGACRY

SEQ ID NO: 9 - protein, 10 aa, Homo sapiens
RTPYSSDNLY

SEQ ID NO: 10 - protein, 10 aa, Homo sapiens
TTPILCGAQY

SEQ ID NO: 11 - protein, 9 aa, Homo sapiens
VTFDGTPSY

SEQ ID NO: 12 - protein, 10 aa, Homo sapiens
SLGGGGGCAL

SEQ ID NO: 13 - protein, 10 aa, Homo sapiens
NALLPAVPSL

SEQ ID NO: 14 - protein, 10 aa, Homo sapiens
AIRNQGYSTV

SEQ ID NO: 15 - protein, 10 aa, Homo sapiens
NMHQRNMTKL

SEQ ID NO: 16 - protein, 9 aa, Homo sapiens
ALLPAVPSL

SEQ ID NO: 17 - protein, 9 aa, Homo sapiens
DLNALLPAV

SEQ ID NO: 18 - protein, 9 aa, Homo sapiens
SLGEQQYSV

SEQ ID NO: 19 - protein, 9 aa, Homo sapiens
NLGATLKGV

SEQ ID NO: 20 - protein, 9 aa, Homo sapiens
NLYQMTSQL

SEQ ID NO: 21 - protein, 9 aa, Homo sapiens
ILCGAQYRI

SEQ ID NO: 22 - protein, 10 aa, Homo sapiens
DVRRVPGVAP

SEQ ID NO: 23 - protein, 10 aa, Homo sapiens
ALLPAVPSLG

SEQ ID NO: 24 - protein, 10 aa, Homo sapiens
ALPVSGAAQW

SEQ ID NO: 25 - protein, 10 aa, Homo sapiens
AIRNQGYSTV

SEQ ID NO: 26 - protein, 10 aa, Homo sapiens
RHQRRHTGVK

SEQ ID NO: 27 - protein, 10 aa, Homo sapiens
GVFRGIQDVR

SEQ ID NO: 28 - protein, 9 aa, Homo sapiens
RVPGVAPTL

SEQ ID NO: 29 - protein, 9 aa, Homo sapiens
RIHTHGVFR

SEQ ID NO: 30 - protein, 9 aa, Homo sapiens
DVRRVPGVA

SEQ ID NO: 31 - protein, 9 aa, Homo sapiens
HQRRHTGVK

SEQ ID NO: 32 - protein, 10 aa, Homo sapiens
CTGSQALLLR

SEQ ID NO: 33 - protein, 10 aa, Homo sapiens
GVFRGIQDVR

SEQ ID NO: 34 - protein, 10 aa, Homo sapiens
HTGVKPFQCK

SEQ ID NO: 35 - protein, 10 aa, Homo sapiens
RTHTGKTSEK

SEQ ID NO: 36 - protein, 10 aa, Homo sapiens
KTHTRTHTGK

SEQ ID NO: 37 - protein, 10 aa, Homo sapiens
RSASETSEKR

SEQ ID NO: 38 - protein, 10 aa, Homo sapiens
LSHLQMHSRK

SEQ ID NO: 39 - protein, 10 aa, Homo sapiens
FSCRWPSCQK

SEQ ID NO: 40 - protein, 9 aa, Homo sapiens
RSASETSEK

SEQ ID NO: 41 - protein, 9 aa, Homo sapiens
FSRSDQLKR

SEQ ID NO: 42 - protein, 10 aa, Homo sapiens
AYPGCNKRYF

SEQ ID NO: 43 - protein, 10 aa, Homo sapiens
QYRIHTHGVF

SEQ ID NO: 44 - protein, 10 aa, Homo sapiens
AFTVHFSGQF

SEQ ID NO: 45 - protein, 10 aa, Homo sapiens
PPPPPPPHSF

SEQ ID NO: 46 - protein, 10 aa, Homo sapiens
PPPPPPHSFI

SEQ ID NO: 47 - protein, 10 aa, Homo sapiens
PYLPSCLESQ

SEQ ID NO: 48 - protein, 9 aa, Homo sapiens
DFKDCERRF

SEQ ID NO: 49 - protein, 9 aa, Homo sapiens
GCNKRYFKL

SEQ ID NO: 50 - protein, 9 aa, Homo sapiens
ALLPAVPSL

SEQ ID NO: 51 - protein, 9 aa, Homo sapiens
PPPPPPHSF

SEQ ID NO: 52 - protein, 10 aa, Homo sapiens
TVTFDGTPSY

SEQ ID NO: 53 - protein, 10 aa, Homo sapiens
DFAPPGASAY

SEQ ID NO: 54 - protein, 10 aa, Homo sapiens
EGQSNHSTGY

SEQ ID NO: 55 - protein, 10 aa, Homo sapiens
TTPILCGAQY

SEQ ID NO: 56 - protein, 10 aa, Homo sapiens
ETSEKRPFMC

SEQ ID NO: 57 - protein, 9 aa, Homo sapiens
DVRDLNALL

SEQ ID NO: 58 - protein, 9 aa, Homo sapiens
VTFDGTPSY

SEQ ID NO: 59 - protein, 9 aa, Homo sapiens
FTVHFSGQF

SEQ ID NO: 60 - protein, 9 aa, Homo sapiens
EKRPFMCAY

SEQ ID NO: 61 - protein, 9 aa, Homo sapiens
ETSEKRPFM

SEQ ID NO: 62 - protein, 11 aa, Homo sapiens
GVFRGIQDVRR

SEQ ID NO: 63 - protein, 11 aa, Homo sapiens
TTPILCGAQYR

SEQ ID NO: 64 - protein, 11 aa, Homo sapiens
ELVRHHNMHQR

SEQ ID NO: 65 - protein, 11 aa, Homo sapiens
PSCLESQPAIR

SEQ ID NO: 66 - protein, 10 aa, Homo sapiens
CTGSQALLLR

SEQ ID NO: 67 - protein, 10 aa, Homo sapiens
GVFRGIQDVR

SEQ ID NO: 68 - protein, 10 aa, Homo sapiens
KTHTRTHTGK

SEQ ID NO: 69 - protein, 10 aa, Homo sapiens
LVRHHNMHQR

SEQ ID NO: 70 - protein, 9 aa, Homo sapiens
FTGTAGACR

SEQ ID NO: 71 - protein, 9 aa, Homo sapiens
RIHTHGVFR

SEQ ID NO: 72 - protein, 10 aa, Homo sapiens
PPGASAYGSL

SEQ ID NO: 73 - protein, 10 aa, Homo sapiens
EPHEEQCLSA

SEQ ID NO: 74 - protein, 10 aa, Homo sapiens
LPSCLESQPA

SEQ ID NO: 75 - protein, 10 aa, Homo sapiens
PPPPPPHSFI

SEQ ID NO: 76 - protein, 10 aa, Homo sapiens
PPSQASSGQA

SEQ ID NO: 77 - protein, 9 aa, Homo sapiens
DPMGQQGSL

SEQ ID NO: 78 - protein, 9 aa, Homo sapiens
PPPPPHSFI

SEQ ID NO: 79 - protein, 9 aa, Homo sapiens
PPPPPPHSF

SEQ ID NO: 80 - protein, 9 aa, Homo sapiens
TPSHHAAQF

SEQ ID NO: 81 - protein, 9 aa, Homo sapiens
WPSCQKKFA

SEQ ID NO: 82 - protein, 9 aa, Homo sapiens
KRYFKLSHL

SEQ ID NO: 83 - protein, 9 aa, Homo sapiens
GCNKRYFKL

SEQ ID NO: 84 - protein, 9 aa, Homo sapiens
KKFARSDEL

SEQ ID NO: 85 - protein, 9 aa, Homo sapiens
GATLKGVAA

SEQ ID NO: 86 - protein, 9 aa, Homo sapiens
RRFSRSDQL

SEQ ID NO: 87 - protein, 8 aa, Homo sapiens
MTKLQLAL

SEQ ID NO: 88 - protein, 8 aa, Homo sapiens
EPHEEQCL

SEQ ID NO: 89 - protein, 8 aa, Homo sapiens
ETSEKRPF

SEQ ID NO: 90 - protein, 8 aa, Homo sapiens
CNKRYFKL

SEQ ID NO: 91 - protein, 8 aa, Homo sapiens
RNMTKLQL

SEQ ID NO: 92 - protein, 10 aa, Homo sapiens
QQYSVPPPVY

SEQ ID NO: 93 - protein, 10 aa, Homo sapiens
TVTFDGTPSY

SEQ ID NO: 94 - protein, 10 aa, Homo sapiens
QQGSLGEQQY

SEQ ID NO: 95 - protein, 10 aa, Homo sapiens
SQALLLRTPY

SEQ ID NO: 96 - protein, 10 aa, Homo sapiens
SQPAIRNQGY

SEQ ID NO: 97 - protein, 10 aa, Homo sapiens
FQCKTCQRKF

SEQ ID NO: 98 - protein, 9 aa, Homo sapiens
AQWAPVLDF

SEQ ID NO: 99 - protein, 9 aa, Homo sapiens
GQSNHSTGY

SEQ ID NO: 100 - protein, 9 aa, Homo sapiens
NQGYSTVTF

SEQ ID NO: 101 - protein, 9 aa, Homo sapiens
CLSAFTVHF

SEQ ID NO: 102 - protein, 9 aa, Homo sapiens
HEEQCLSAF

SEQ ID NO: 103 - protein, 9 aa, Homo sapiens
SETSEKRPF

SEQ ID NO: 104 - protein, 9 aa, Homo sapiens
GEKPYQCDF

SEQ ID NO: 105 - protein, 9 aa, Homo sapiens
SEKPFSCRW

SEQ ID NO: 106 - protein, 9 aa, Homo sapiens
AEPHEEQCL

SEQ ID NO: 107 - protein, 9 aa, Homo sapiens
DVRDLNALL

SEQ ID NO: 108 - protein, 9 aa, Homo sapiens
QALLLRTPY

SEQ ID NO: 109 - protein, 8 aa, Homo sapiens
EEQCLSAF

SEQ ID NO: 110 - protein, 8 aa, Homo sapiens
ETSEKRPF

SEQ ID NO: 111 - protein, 8 aa, Homo sapiens
DELVRHHN

SEQ ID NO: 112 - protein, 10 aa, Homo sapiens
RRVPGVAPTL

SEQ ID NO: 113 - protein, 10 aa, Homo sapiens
RRFSRSDQLK

SEQ ID NO: 114 - protein, 10 aa, Homo sapiens
CRWPSCQKKF

SEQ ID NO: 115 - protein, 10 aa, Homo sapiens
LRTPYSSDNL

SEQ ID NO: 116 - protein, 9 aa, Homo sapiens
RRFSRSDQL

SEQ ID NO: 117 - protein, 9 aa, Homo sapiens
KRYFKLSHL

SEQ ID NO: 118 - protein, 9 aa, Homo sapiens
RRHTGVKPF

SEQ ID NO: 119 - protein, 9 aa, Homo sapiens
FRGIQDVRR

SEQ ID NO: 120 - protein, 9 aa, Homo sapiens
CRWPSCQKK

SEQ ID NO: 121 - protein, 9 aa, Homo sapiens
ARSDELVRH

SEQ ID NO: 122 - protein, 10 aa, Homo sapiens
PPGASAYGSL

SEQ ID NO: 123 - protein, 10 aa, Homo sapiens
PPPPPPPHSF

SEQ ID NO: 124 - protein, 10 aa, Homo sapiens
PPPPPPHSFI

SEQ ID NO: 125 - protein, 9 aa, Homo sapiens
TPYSSDNLY

SEQ ID NO: 126 - protein, 9 aa, Homo sapiens
QPAIRNQGY

SEQ ID NO: 127 - protein, 9 aa, Homo sapiens
DPMGQQGSL

SEQ ID NO: 128 - protein, 9 aa, Homo sapiens
TPILCGAQY

SEQ ID NO: 129 - protein, 9 aa, Homo sapiens
TPSHHAAQF

SEQ ID NO: 130 - protein, 9 aa, Homo sapiens
PPPPPPHSF

SEQ ID NO: 131 - protein, 9 aa, Homo sapiens
YPGCNKRYF

SEQ ID NO: 132 - protein, 10 aa, Homo sapiens
ASETSEKRPF

SEQ ID NO: 133 - protein, 10 aa, Homo sapiens
QASSGQARMF

SEQ ID NO: 134 - protein, 10 aa, Homo sapiens
RTPYSSDNLY

SEQ ID NO: 135 - protein, 10 aa, Homo sapiens
DSCTGSQALL

SEQ ID NO: 136 - protein, 9 aa, Homo sapiens
ASSGQARMF

SEQ ID NO: 137 - protein, 9 aa, Homo sapiens
RVPGVAPTL

SEQ ID NO: 138 - protein, 9 aa, Homo sapiens
TSQLECMTW

SEQ ID NO: 139 - protein, 9 aa, Homo sapiens
HTHGVFRGI

SEQ ID NO: 140 - protein, 9 aa, Homo sapiens
RTPYSSDNL

SEQ ID NO: 141 - protein, 9 aa, Homo sapiens
RSDELVRHH

SEQ ID NO: 142 - protein, 15 aa, Homo sapiens
ASAYGSLGGPAPPPA

SEQ ID NO: 143 - protein, 15 aa, Homo sapiens
GSDVRDLNALLPAVP

SEQ ID NO: 144 - protein, 15 aa, Homo sapiens
IQDVRRVPGVAPTLV

SEQ ID NO: 145 - protein, 15 aa, Homo sapiens
VRDLNALLPAVPSLG

SEQ ID NO: 146 - protein, 15 aa, Homo sapiens
GATLKGVAAGSSSSV

SEQ ID NO: 147 - protein, 15 aa, Homo sapiens
TVHFSGQFTGTAGAC

SEQ ID NO: 148 - protein, 15 aa, Homo sapiens
VRRVPGVAPTLVRSA

SEQ ID NO: 149 - protein, 15 aa, Homo sapiens
NKRYFKLSHLQMHSR

SEQ ID NO: 150 - protein, 15 aa, Homo sapiens
LPAVPSLGGGGGCAL

SEQ ID NO: 151 - protein, 15 aa, Homo sapiens
RDLNALLPAVPSLGG

SEQ ID NO: 152 - protein, 15 aa, Homo sapiens
YSTVTFDGTPSYGHT

SEQ ID NO: 153 - protein, 15 aa, Homo sapiens
MGSDVRDLNALLPAV

SEQ ID NO: 154 - protein, 15 aa, Homo sapiens
YQCDFKDCERRFSRS

SEQ ID NO: 155 - protein, 15 aa, Homo sapiens
VPSLGGGGGCALPVS

SEQ ID NO: 156 - protein, 15 aa, Homo sapiens
VLDFAPPGASAYGSL

SEQ ID NO: 157 - protein, 15 aa, Homo sapiens
LYQMTSQLECMTWNQ

SEQ ID NO: 158 - protein, 15 aa, Homo sapiens
PTLVRSASETSEKRP

SEQ ID NO: 159 - protein, 15 aa, Homo sapiens
HHNMHQRNMTKLQLA

SEQ ID NO: 160 - protein, 15 aa, Homo sapiens
NKRYFKLSHLQMHSR

SEQ ID NO: 161 - protein, 15 aa, Homo sapiens
TVHFSGQFTGTAGAC

SEQ ID NO: 162 - protein, 15 aa, Homo sapiens
ARMFPNAPYLPSCLE

SEQ ID NO: 163 - protein, 15 aa, Homo sapiens
NQGYSTVTFDGTPSY

SEQ ID NO: 164 - protein, 15 aa, Homo sapiens
TPSYGHTPSHHAAQF

SEQ ID NO: 165 - protein, 15 aa, Homo sapiens
NHSFKHEDPMGQQGS

SEQ ID NO: 166 - protein, 15 aa, Homo sapiens
RTPYSSDNLYQMTSQ

SEQ ID NO: 167 - protein, 15 aa, Homo sapiens
SVKWTEGQSNHSTGY

SEQ ID NO: 168 - protein, 15 aa, Homo sapiens
STGYESDNHTTPILC

SEQ ID NO: 169 - protein, 15 aa, Homo sapiens
KRPFMCAYPGCNKRY

SEQ ID NO: 170 - protein, 15 aa, Homo sapiens
TPSYGHTPSHHAAQF

SEQ ID NO: 171 - protein, 15 aa, Homo sapiens
TVTFDGTPSYGHTPS

SEQ ID NO: 172 - protein, 15 aa, Homo sapiens
LSAFTVHFSGQFTGT

SEQ ID NO: 173 - protein, 15 aa, Homo sapiens
TPTDSCTGSQALLLR

SEQ ID NO: 174 - protein, 15 aa, Homo sapiens
LKGVAAGSSSSVKWT

SEQ ID NO: 175 - protein, 15 aa, Homo sapiens
TVHFSGQFTGTAGAC

SEQ ID NO: 176 - protein, 15 aa, Homo sapiens
YSTVTFDGTPSYGHT

SEQ ID NO: 177 - protein, 15 aa, Homo sapiens
CGAQYRIHTHGVFRG

SEQ ID NO: 178 - protein, 15 aa, Homo sapiens
HGVFRGIQDVRRVPG

SEQ ID NO: 179 - protein, 15 aa, Homo sapiens
APTLVRSASETSEKR

SEQ ID NO: 180 - protein, 15 aa, Homo sapiens
FRGIQDVRRVPGVAP

SEQ ID NO: 181 - protein, 15 aa, Homo sapiens
NKRYFKLSHLQMHSR

SEQ ID NO: 182 - protein, 15 aa, Homo sapiens
QCDFKDCERRFSRSD

SEQ ID NO: 183 - protein, 15 aa, Homo sapiens
STGYESDNHTTPILC

SEQ ID NO: 184 - protein, 15 aa, Homo sapiens
SCRWPSCQKKFARSD

SEQ ID NO: 185 - protein, 15 aa, Homo sapiens
AAQWAPVLDFAPPGA

SEQ ID NO: 186 - protein, 15 aa, Homo sapiens
ASAYGSLGGPAPPPA

SEQ ID NO: 187 - protein, 15 aa, Homo sapiens
PGVAPTLVRSASETS

SEQ ID NO: 188 - protein, 15 aa, Homo sapiens
QMNLGATLKGVAAGS

SEQ ID NO: 189 - protein, 15 aa, Homo sapiens
WAPVLDFAPPGASAY

SEQ ID NO: 190 - protein, 15 aa, Homo sapiens
RPFMCAYPGCNKRYF

SEQ ID NO: 191 - protein, 15 aa, Homo sapiens
GSDVRDLNALLPAVP

SEQ ID NO: 192 - protein, 15 aa, Homo sapiens
NALLPAVPSLGGGGG

SEQ ID NO: 193 - protein, 15 aa, Homo sapiens
PPGASAYGSLGGPAP

SEQ ID NO: 194 - protein, 15 aa, Homo sapiens
EQCLSAFTVHFSGQF

SEQ ID NO: 195 - protein, 15 aa, Homo sapiens
TAGACRYGPFGPPPP

SEQ ID NO: 196 - protein, 15 aa, Homo sapiens
PSCLESQPAIRNQGY

SEQ ID NO: 197 - protein, 15 aa, Homo sapiens
WNQMNLGATLKGVAA

SEQ ID NO: 198 - protein, 15 aa, Homo sapiens
IQDVRRVPGVAPTLV

SEQ ID NO: 199 - protein, 509 aa, Homo sapiens
MERRRLWGSIQSRYISMSVWTSPRRLVELAGQSLLKDEALAIAALELLPRELFPPLFMAAFDGRHSQTLKAMVQAWPFTCLPLGVLMKGQHLHLETFKAVLDGLDVLLAQEVRPRRWKLQVLDLRKNSHQDFWTVWSGNRASLYSFPEPEAAQPMTKKRKVDGLSTEAEQPFIPVEVLVDLFLKEGACDELFSYLIEKVKRKKNVLRLCCKKLKIFAMPMQDIKMILKMVQLDSIEDLEVTCTWKLPTLAKFSPYLGQMINLRRLLLSHIHASSYISPEKEEQYIAQFTSQFLSLQCLQALYVDSLFFLRGRLDQLLRHVMNPLETLSITNCRLSEGDVMHLSQSPSVSQLSVLSLSGVMLTDVSPEPLQALLERASATLQDLVFDECGITDDQLLALLPSLSHCSQLTTLSFYGNSISISALQSLLQHLIGLSNLTHVLYPVPLESYEDIHGTLHLERLAYLHARLRELLCELGRPSMVWLSANPCPHCGDRTFYDPEPILCPCFMPN

SEQ ID NO: 200 - protein, 11 aa, Homo sapiens
LTDVSPEPLQA

SEQ ID NO: 201 - protein, 11 aa, Homo sapiens
ITDDQLLALLP

SEQ ID NO: 202 - protein, 11 aa, Homo sapiens
HGTLHLERLAY

SEQ ID NO: 203 - protein, 10 aa, Homo sapiens
GTLHLERLAY

SEQ ID NO: 204 - protein, 10 aa, Homo sapiens
CSQLTTLSFY

SEQ ID NO: 205 - protein, 10 aa, Homo sapiens
LSLQCLQALY

SEQ ID NO: 206 - protein, 9 aa, Homo sapiens
PTLAKFSPY

SEQ ID NO: 207 - protein, 9 aa, Homo sapiens
LSNLTHVLY

SEQ ID NO: 208 - protein, 9 aa, Homo sapiens
WSGNRASLY

SEQ ID NO: 209 - protein, 9 aa, Homo sapiens
LSHIHASSY

SEQ ID NO: 210 - protein, 10 aa, Homo sapiens
ALLERASATL

SEQ ID NO: 211 - protein, 10 aa, Homo sapiens
ALAIAALELL

SEQ ID NO: 212 - protein, 10 aa, Homo sapiens
SLSGVMLTDV

SEQ ID NO: 213 - protein, 10 aa, Homo sapiens
ALYVDSLFFL

SEQ ID NO: 214 - protein, 9 aa, Homo sapiens
QLLALLPSL

SEQ ID NO: 215 - protein, 9 aa, Homo sapiens
SLLQHLIGL

SEQ ID NO: 216 - protein, 9 aa, Homo sapiens
RLRELLCEL

SEQ ID NO: 217 - protein, 9 aa, Homo sapiens
YLHARLREL

SEQ ID NO: 218 - protein, 9 aa, Homo sapiens
ALAIAALEL

SEQ ID NO: 219 - protein, 9 aa, Homo sapiens
FLRGRLDQL

SEQ ID NO: 220 - protein, 10 aa, Homo sapiens
HLIGLSNLTH

SEQ ID NO: 221 - protein, 10 aa, Homo sapiens
RLWGSIQSRY

SEQ ID NO: 222 - protein, 10 aa, Homo sapiens
KVKRKKNVLR

SEQ ID NO: 223 - protein, 10 aa, Homo sapiens
VLYPVPLESY

SEQ ID NO: 224 - protein, 9 aa, Homo sapiens
CLPLGVLMK

SEQ ID NO: 225 - protein, 9 aa, Homo sapiens
ELAGQSLLK

SEQ ID NO: 226 - protein, 9 aa, Homo sapiens
KLQVLDLRK

SEQ ID NO: 227 - protein, 9 aa, Homo sapiens
RLSEGDVMH

SEQ ID NO: 228 - protein, 9 aa, Homo sapiens
YLIEKVKRK

SEQ ID NO: 229 - protein, 9 aa, Homo sapiens
NVLRLCCKK

SEQ ID NO: 230 - protein, 10 aa, Homo sapiens
KVKRKKNVLR

SEQ ID NO: 231 - protein, 10 aa, Homo sapiens
PMQDIKMILK

SEQ ID NO: 232 - protein, 10 aa, Homo sapiens
CTWKLPTLAK

SEQ ID NO: 233 - protein, 10 aa, Homo sapiens
AIAALELLPR

SEQ ID NO: 234 - protein, 10 aa, Homo sapiens
AVLDGLDVLL

SEQ ID NO: 235 - protein, 10 aa, Homo sapiens
FSYLIEKVKR

SEQ ID NO: 236 - protein, 9 aa, Homo sapiens
ELAGQSLLK

SEQ ID NO: 237 - protein, 9 aa, Homo sapiens
EVLVDLFLK

SEQ ID NO: 238 - protein, 9 aa, Homo sapiens
ASSYISPEK

SEQ ID NO: 239 - protein, 9 aa, Homo sapiens
ELFSYLIEK

SEQ ID NO: 240 - protein, 10 aa, Homo sapiens
QYIAQFTSQF

SEQ ID NO: 241 - protein, 10 aa, Homo sapiens
AYLHARLREL

SEQ ID NO: 242 - protein, 10 aa, Homo sapiens
LFPPLFMAAF

SEQ ID NO: 243 - protein, 10 aa, Homo sapiens
KFSPYLGQMI

SEQ ID NO: 244 - protein, 10 aa, Homo sapiens
FFLRGRLDQL

SEQ ID NO: 245 - protein, 10 aa, Homo sapiens
VSPEPLQALL

SEQ ID NO: 246 - protein, 9 aa, Homo sapiens
SYEDIHGTL

SEQ ID NO: 247 - protein, 9 aa, Homo sapiens
PYLGQMINL

SEQ ID NO: 248 - protein, 9 aa, Homo sapiens
LYVDSLFFL

SEQ ID NO: 249 - protein, 9 aa, Homo sapiens
TFYDPEPIL

SEQ ID NO: 250 - protein, 10 aa, Homo sapiens
ETFKAVLDGL

SEQ ID NO: 251 - protein, 10 aa, Homo sapiens
DVSPEPLQAL

SEQ ID NO: 252 - protein, 10 aa, Homo sapiens
ETLSITNCRL

SEQ ID NO: 253 - protein, 10 aa, Homo sapiens
EGACDELFSY

SEQ ID NO: 254 - protein, 10 aa, Homo sapiens
EKEEQYIAQF

SEQ ID NO: 255 - protein, 10 aa, Homo sapiens
SVSQLSVLSL

SEQ ID NO: 256 - protein, 9 aa, Homo sapiens
EVRPRRWKL

SEQ ID NO: 257 - protein, 9 aa, Homo sapiens
ETFKAVLDG

SEQ ID NO: 258 - protein, 9 aa, Homo sapiens
EVLVDLFLK

SEQ ID NO: 259 - protein, 11 aa, Homo sapiens
DVLLAQEVRPR

SEQ ID NO: 260 - protein, 10 aa, Homo sapiens
EAAQPMTKKR

SEQ ID NO: 261 - protein, 10 aa, Homo sapiens
KVKRKKNVLR

SEQ ID NO: 262 - protein, 9 aa, Homo sapiens
EAAQPMTKK

SEQ ID NO: 263 - protein, 9 aa, Homo sapiens
EVLVDLFLK

SEQ ID NO: 264 - protein, 9 aa, Homo sapiens
ELFSYLIEK

SEQ ID NO: 265 - protein, 9 aa, Homo sapiens
ETLSITNCR

SEQ ID NO: 266 - protein, 9 aa, Homo sapiens
DVLLAQEVR

SEQ ID NO: 267 - protein, 9 aa, Homo sapiens
DSLFFLRGR

SEQ ID NO: 268 - protein, 9 aa, Homo sapiens
IAALELLPR

SEQ ID NO: 269 - protein, 10 aa, Homo sapiens
RPRRWKLQVL

SEQ ID NO: 270 - protein, 10 aa, Homo sapiens
SPSVSQLSVL

SEQ ID NO: 271 - protein, 10 aa, Homo sapiens
LPSLSHCSQL

SEQ ID NO: 272 - protein, 10 aa, Homo sapiens
MPMQDIKMIL

SEQ ID NO: 273 - protein, 9 aa, Homo sapiens
LPRELFPPL

SEQ ID NO: 274 - protein, 9 aa, Homo sapiens
QPFIPVEVL

SEQ ID NO: 275 - protein, 9 aa, Homo sapiens
IPVEVLVDL

SEQ ID NO: 276 - protein, 9 aa, Homo sapiens
SPEPLQALL

SEQ ID NO: 277 - protein, 9 aa, Homo sapiens
RPRRWKLQV

SEQ ID NO: 278 - protein, 9 aa, Homo sapiens
RPSMVWLSA

SEQ ID NO: 279 - protein, 9 aa, Homo sapiens
TKKRKVDGL

SEQ ID NO: 280 - protein, 9 aa, Homo sapiens
FLRGRLDQL

SEQ ID NO: 281 - protein, 9 aa, Homo sapiens
KVKRKKNVL

SEQ ID NO: 282 - protein, 9 aa, Homo sapiens
EVRPRRWKL

SEQ ID NO: 283 - protein, 9 aa, Homo sapiens
PRRWKLQVL

SEQ ID NO: 284 - protein, 9 aa, Homo sapiens
VLRLCCKKL

SEQ ID NO: 285 - protein, 9 aa, Homo sapiens
YLHARLREL

SEQ ID NO: 286 - protein, 9 aa, Homo sapiens
RLRELLCEL

SEQ ID NO: 287 - protein, 8 aa, Homo sapiens
HARLRELL

SEQ ID NO: 288 - protein, 8 aa, Homo sapiens
VKRKKNVL

SEQ ID NO: 289 - protein, 10 aa, Homo sapiens
VLYPVPLESY

SEQ ID NO: 290 - protein, 10 aa, Homo sapiens
RLWGSIQSRY

SEQ ID NO: 291 - protein, 10 aa, Homo sapiens
GLSNLTHVLY

SEQ ID NO: 292 - protein, 10 aa, Homo sapiens
RLCCKKLKIF

SEQ ID NO: 293 - protein, 10 aa, Homo sapiens
LLSHIHASSY

SEQ ID NO: 294 - protein, 9 aa, Homo sapiens
TLHLERLAY

SEQ ID NO: 295 - protein, 9 aa, Homo sapiens
GQHLHLETF

SEQ ID NO: 296 - protein, 9 aa, Homo sapiens
SLQCLQALY

SEQ ID NO: 297 - protein, 9 aa, Homo sapiens
ALYVDSLFF

SEQ ID NO: 298 - protein, 9 aa, Homo sapiens
SQLTTLSFY

SEQ ID NO: 299 - protein, 9 aa, Homo sapiens
DEALAIAAL

SEQ ID NO: 300 - protein, 9 aa, Homo sapiens
LELLPRELF

SEQ ID NO: 301 - protein, 9 aa, Homo sapiens
KEGACDELF

SEQ ID NO: 302 - protein, 9 aa, Homo sapiens
PEPILCPCF

SEQ ID NO: 303 - protein, 8 aa, Homo sapiens
VEVLVDLF

SEQ ID NO: 304 - protein, 8 aa, Homo sapiens
EEQYIAQF

SEQ ID NO: 305 - protein, 8 aa, Homo sapiens
LELLPREL

SEQ ID NO: 306 - protein, 8 aa, Homo sapiens
RELFPPLF

SEQ ID NO: 307 - protein, 8 aa, Homo sapiens
SEGDVMHL

SEQ ID NO: 308 - protein, 8 aa, Homo sapiens
LERASATL

SEQ ID NO: 309 - protein, 10 aa, Homo sapiens
RRLWGSIQSR

SEQ ID NO: 310 - protein, 10 aa, Homo sapiens
RRWKLQVLDL

SEQ ID NO: 311 - protein, 10 aa, Homo sapiens
ERLAYLHARL

SEQ ID NO: 312 - protein, 10 aa, Homo sapiens
ARLRELLCEL

SEQ ID NO: 313 - protein, 9 aa, Homo sapiens
KRKKNVLRL

SEQ ID NO: 314 - protein, 9 aa, Homo sapiens
RRLLLSHIH

SEQ ID NO: 315 - protein, 9 aa, Homo sapiens
GRLDQLLRH

SEQ ID NO: 316 - protein, 9 aa, Homo sapiens
PRRWKLQVL

SEQ ID NO: 317 - protein, 9 aa, Homo sapiens
LRLCCKKLK

SEQ ID NO: 318 - protein, 9 aa, Homo sapiens
ERLAYLHAR

SEQ ID NO: 319 - protein, 10 aa, Homo sapiens
RPRRWKLQVL

SEQ ID NO: 320 - protein, 10 aa, Homo sapiens
SPSVSQLSVL

SEQ ID NO: 321 - protein, 10 aa, Homo sapiens
LPRELFPPLF

SEQ ID NO: 322 - protein, 10 aa, Homo sapiens
IPVEVLVDLF

SEQ ID NO: 323 - protein, 10 aa, Homo sapiens
MPMQDIKMIL

SEQ ID NO: 324 - protein, 10 aa, Homo sapiens
LPTLAKFSPY

SEQ ID NO: 325 - protein, 9 aa, Homo sapiens
IPVEVLVDL

SEQ ID NO: 326 - protein, 9 aa, Homo sapiens
LPRELFPPL

SEQ ID NO: 327 - protein, 9 aa, Homo sapiens
SPEPLQALL

SEQ ID NO: 328 - protein, 9 aa, Homo sapiens
QPFIPVEVL

SEQ ID NO: 329 - protein, 10 aa, Homo sapiens
MSVWTSPRRL

SEQ ID NO: 330 - protein, 10 aa, Homo sapiens
AALELLPREL

SEQ ID NO: 331 - protein, 10 aa, Homo sapiens
KAVLDGLDVL

SEQ ID NO: 332 - protein, 10 aa, Homo sapiens
LAQEVRPRRW

SEQ ID NO: 333 - protein, 10 aa, Homo sapiens
ESYEDIHGTL

SEQ ID NO: 334 - protein, 10 aa, Homo sapiens
LSLQCLQALY

SEQ ID NO: 335 - protein, 10 aa, Homo sapiens
VSPEPLQALL

SEQ ID NO: 336 - protein, 10 aa, Homo sapiens
LSHCSQLTTL

SEQ ID NO: 337 - protein, 9 aa, Homo sapiens
KAMVQAWPF

SEQ ID NO: 338 - protein, 9 aa, Homo sapiens
KVKRKKNVL

SEQ ID NO: 339 - protein, 15 aa, Homo sapiens
PRRLVELAGQSLLKD

SEQ ID NO: 340 - protein, 15 aa, Homo sapiens
LDGLDVLLAQEVRPR

SEQ ID NO: 341 - protein, 15 aa, Homo sapiens
FLSLQCLQALYVDSL

SEQ ID NO: 342 - protein, 15 aa, Homo sapiens
RHVMNPLETLSITNC

SEQ ID NO: 343 - protein, 15 aa, Homo sapiens
QLSVLSLSGVMLTDV

SEQ ID NO: 344 - protein, 15 aa, Homo sapiens
RRLWGSIQSRYISMS

SEQ ID NO: 345 - protein, 15 aa, Homo sapiens
EEQYIAQFTSQFLSL

SEQ ID NO: 346 - protein, 15 aa, Homo sapiens
DDQLLALLPSLSHCS

SEQ ID NO: 347 - protein, 15 aa, Homo sapiens
GVMLTDVSPEPLQAL

SEQ ID NO: 348 - protein, 15 aa, Homo sapiens
GQSLLKDEALAIAAL

SEQ ID NO: 349 - protein, 15 aa, Homo sapiens
ECGITDDQLLALLPS

SEQ ID NO: 350 - protein, 15 aa, Homo sapiens
LKMVQLDSIEDLEVT

SEQ ID NO: 351 - protein, 15 aa, Homo sapiens
LQALYVDSLFFLRGR

SEQ ID NO: 352 - protein, 15 aa, Homo sapiens
RRLVELAGQSLLKDE

SEQ ID NO: 353 - protein, 15 aa, Homo sapiens
IAALELLPRELFPPL

SEQ ID NO: 354 - protein, 15 aa, Homo sapiens
LGQMINLRRLLLSHI

SEQ ID NO: 355 - protein, 15 aa, Homo sapiens
FWTVWSGNRASLYSF

SEQ ID NO: 356 - protein, 15 aa, Homo sapiens
SSYISPEKEEQYIAQ

SEQ ID NO: 357 - protein, 15 aa, Homo sapiens
LAYLHARLRELLCEL

SEQ ID NO: 358 - protein, 15 aa, Homo sapiens
GQSLLKDEALAIAAL

SEQ ID NO: 359 - protein, 15 aa, Homo sapiens
RRLWGSIQSRYISMS

SEQ ID NO: 360 - protein, 15 aa, Homo sapiens
RRLVELAGQSLLKDE

SEQ ID NO: 361 - protein, 15 aa, Homo sapiens
SYLIEKVKRKKNVLR

SEQ ID NO: 362 - protein, 15 aa, Homo sapiens
LGQMINLRRLLLSHI

SEQ ID NO: 363 - protein, 15 aa, Homo sapiens
EQYIAQFTSQFLSLQ

SEQ ID NO: 364 - protein, 15 aa, Homo sapiens
RGRLDQLLRHVMNPL

SEQ ID NO: 365 - protein, 15 aa, Homo sapiens
RHVMNPLETLSITNC

SEQ ID NO: 366 - protein, 15 aa, Homo sapiens
EGDVMHLSQSPSVSQ

SEQ ID NO: 367 - protein, 15 aa, Homo sapiens
LALLPSLSHCSQLTT

SEQ ID NO: 368 - protein, 15 aa, Homo sapiens
SISISALQSLLQHLI

SEQ ID NO: 369 - protein, 15 aa, Homo sapiens
RRLWGSIQSRYISMS

SEQ ID NO: 370 - protein, 15 aa, Homo sapiens
IEDLEVTCTWKLPTL

SEQ ID NO: 371 - protein, 15 aa, Homo sapiens
GDVMHLSQSPSVSQL

SEQ ID NO: 372 - protein, 15 aa, Homo sapiens
MVQLDSIEDLEVTCT

SEQ ID NO: 373 - protein, 15 aa, Homo sapiens
LSFYGNSISISALQS

SEQ ID NO: 374 - protein, 15 aa, Homo sapiens
MAAFDGRHSQTLKAM

SEQ ID NO: 375 - protein, 15 aa, Homo sapiens
EEQYIAQFTSQFLSL

SEQ ID NO: 376 - protein, 15 aa, Homo sapiens
EQYIAQFTSQFLSLQ

SEQ ID NO: 377 - protein, 15 aa, Homo sapiens
RHVMNPLETLSITNC

SEQ ID NO: 378 - protein, 15 aa, Homo sapiens
LQALLERASATLQDL

SEQ ID NO: 379 - protein, 15 aa, Homo sapiens
TWKLPTLAKFSPYLG

SEQ ID NO: 380 - protein, 15 aa, Homo sapiens
QSRYISMSVWTSPRR

SEQ ID NO: 381 - protein, 15 aa, Homo sapiens
AQPMTKKRKVDGLST

SEQ ID NO: 382 - protein, 15 aa, Homo sapiens
TSQFLSLQCLQALYV

SEQ ID NO: 383 - protein, 15 aa, Homo sapiens
MSVWTSPRRLVELAG

SEQ ID NO: 384 - protein, 15 aa, Homo sapiens
IAALELLPRELFPPL

SEQ ID NO: 385 - protein, 15 aa, Homo sapiens
CLPLGVLMKGQHLHL

SEQ ID NO: 386 - protein, 15 aa, Homo sapiens
QDFWTVWSGNRASLY

SEQ ID NO: 387 - protein, 15 aa, Homo sapiens
SYLIEKVKRKKNVLR

SEQ ID NO: 388 - protein, 15 aa, Homo sapiens
MQDIKMILKMVQLDS

SEQ ID NO: 389 - protein, 15 aa, Homo sapiens
HLHLETFKAVLDGLD

SEQ ID NO: 390 - protein, 15 aa, Homo sapiens
PVPLESYEDIHGTLH

SEQ ID NO: 391 - protein, 15 aa, Homo sapiens
YISMSVWTSPRRLVE

SEQ ID NO: 392 - protein, 15 aa, Homo sapiens
PLFMAAFDGRHSQTL

SEQ ID NO: 393 - protein, 15 aa, Homo sapiens
LPTLAKFSPYLGQMI

SEQ ID NO: 394 - protein, 15 aa, Homo sapiens
EQYIAQFTSQFLSLQ

SEQ ID NO: 395 - protein, 15 aa, Homo sapiens
LTTLSFYGNSISISA

SEQ ID NO: 396 - protein, 15 aa, Homo sapiens
LAKFSPYLGQMINLR

SEQ ID NO: 397 - protein, 15 aa, Homo sapiens
MERRRLWGSIQSRYI

SEQ ID NO: 398 - protein, 15 aa, Homo sapiens
GSIQSRYISMSVWTS

SEQ ID NO: 399 - protein, 141 aa, Homo sapiens
MGAPTLPPAWQPFLKDHRISTFKNWPFLEGCACTPERMAEAGFIHCPTENEPDLQCFFCFKELEGWEPDDDPIEEHKKHSSGCAFLSVKKQFEELTLGEFLKLDRERAKNKIAKETNNKKKEFEETAKKVRRAIEQLAAMD

SEQ ID NO: 400 - protein, 11 aa, Homo sapiens
PTENEPDLAQC

SEQ ID NO: 401 - protein, 11 aa, Homo sapiens
KLDRERAKNKI

SEQ ID NO: 402 - protein, 11 aa, Homo sapiens
LKDHRISTFKN

SEQ ID NO: 403 - protein, 11 aa, Homo sapiens
STFKNWPFLEG

SEQ ID NO: 404 - protein, 11 aa, Homo sapiens
DDDPIEEHKKH

SEQ ID NO: 405 - protein, 10 aa, Homo sapiens
PTENEPDLAQ

SEQ ID NO: 406 - protein, 9 aa, Homo sapiens
PTENEPDLA

SEQ ID NO: 407 - protein, 9 aa, Homo sapiens
LTLGEFLKL

SEQ ID NO: 408 - protein, 9 aa, Homo sapiens
LGEFLKLDR

SEQ ID NO: 409 - protein, 9 aa, Homo sapiens
KLDRERAKN

SEQ ID NO: 410 - protein, 10 aa, Homo sapiens
TLPPAWQPFL

SEQ ID NO: 411 - protein, 10 aa, Homo sapiens
ELTLGEFLKL

SEQ ID NO: 412 - protein, 10 aa, Homo sapiens
FLKDHRISTF

SEQ ID NO: 413 - protein, 9 aa, Homo sapiens
LTLGEFLKL

SEQ ID NO: 414 - protein, 9 aa, Homo sapiens
KVRRAIEQL

SEQ ID NO: 415 - protein, 9 aa, Homo sapiens
RAIEQLAAM

SEQ ID NO: 416 - protein, 9 aa, Homo sapiens
STFKNWPFL

SEQ ID NO: 417 - protein, 9 aa, Homo sapiens
FLKDHRIST

SEQ ID NO: 418 - protein, 9 aa, Homo sapiens
SVKKQFEEL

SEQ ID NO: 419 - protein, 9 aa, Homo sapiens
TLGEFLKLD

SEQ ID NO: 420 - protein, 10 aa, Homo sapiens
KLDRERAKNK

SEQ ID NO: 421 - protein, 10 aa, Homo sapiens
FLKDHRISTF

SEQ ID NO: 422 - protein, 10 aa, Homo sapiens
FLKLDRERAK

SEQ ID NO: 423 - protein, 10 aa, Homo sapiens
KIAKETNNKK

SEQ ID NO: 424 - protein, 10 aa, Homo sapiens
DLAQCFFCFK

SEQ ID NO: 425 - protein, 9 aa, Homo sapiens
ELTLGEFLK

SEQ ID NO: 426 - protein, 9 aa, Homo sapiens
KIAKETNNK

SEQ ID NO: 427 - protein, 9 aa, Homo sapiens
KVRRAIEQL

SEQ ID NO: 428 - protein, 9 aa, Homo sapiens
SGCAFLSVK

SEQ ID NO: 429 - protein, 9 aa, Homo sapiens
KLDRERAKN

SEQ ID NO: 430 - protein, 10 aa, Homo sapiens
SSGCAFLSVK

SEQ ID NO: 431 - protein, 10 aa, Homo sapiens
DLAQCFFCFK

SEQ ID NO: 432 - protein, 10 aa, Homo sapiens
SGCAFLSVKK

SEQ ID NO: 433 - protein, 10 aa, Homo sapiens
TLGEFLKLDR

SEQ ID NO: 434 - protein, 10 aa, Homo sapiens
STFKNWPFLE

SEQ ID NO: 435 - protein, 10 aa, Homo sapiens
KLDRERAKNK

SEQ ID NO: 436 - protein, 10 aa, Homo sapiens
KIAKETNNKK

SEQ ID NO: 437 - protein, 9 aa, Homo sapiens
SSGCAFLSV

SEQ ID NO: 438 - protein, 9 aa, Homo sapiens
GCAFLSVKK

SEQ ID NO: 439 - protein, 9 aa, Homo sapiens
ELTLGEFLK

SEQ ID NO: 440 - protein, 10 aa, Homo sapiens
QFEELTLGEF

SEQ ID NO: 441 - protein, 10 aa, Homo sapiens
TLPPAWQPFL

SEQ ID NO: 442 - protein, 10 aa, Homo sapiens
PDLAQCFFCF

SEQ ID NO: 443 - protein, 10 aa, Homo sapiens
PTLPPAWQPF

SEQ ID NO: 444 - protein, 10 aa, Homo sapiens
NEPDLAQCFF

SEQ ID NO: 445 - protein, 10 aa, Homo sapiens
LSVKKQFEEL

SEQ ID NO: 446 - protein, 10 aa, Homo sapiens
ELTLGEFLKL

SEQ ID NO: 447 - protein, 9 aa, Homo sapiens
AFLSVKKQF

SEQ ID NO: 448 - protein, 9 aa, Homo sapiens
LTLGEFLKL

SEQ ID NO: 449 - protein, 9 aa, Homo sapiens
TLPPAWQPF

SEQ ID NO: 450 - protein, 10 aa, Homo sapiens
ELTLGEFLKL

SEQ ID NO: 451 - protein, 10 aa, Homo sapiens
ENEPDLAQCF

SEQ ID NO: 452 - protein, 10 aa, Homo sapiens
ETAKKVRRAI

SEQ ID NO: 453 - protein, 10 aa, Homo sapiens
ETNNKKKEFE

SEQ ID NO: 454 - protein, 9 aa, Homo sapiens
ETNNKKKEF

SEQ ID NO: 455 - protein, 9 aa, Homo sapiens
ETAKKVRRA

SEQ ID NO: 456 - protein, 9 aa, Homo sapiens
KVRRAIEQL

SEQ ID NO: 457 - protein, 9 aa, Homo sapiens
STFKNWPFL

SEQ ID NO: 458 - protein, 9 aa, Homo sapiens
EELTLGEFL

SEQ ID NO: 459 - protein, 9 aa, Homo sapiens
SVKKQFEEL

SEQ ID NO: 460 - protein, 11 aa, Homo sapiens
LTLGEFLKLDR

SEQ ID NO: 461 - protein, 11 aa, Homo sapiens
PAWQPFLKDHR

SEQ ID NO: 462 - protein, 11 aa, Homo sapiens
SSGCAFLSVKK

SEQ ID NO: 463 - protein, 11 aa, Homo sapiens
EFEETAKKVRR

SEQ ID NO: 464 - protein, 11 aa, Homo sapiens
ETAKKVRRAIE

SEQ ID NO: 465 - protein, 10 aa, Homo sapiens
DLAQCFFCFK

SEQ ID NO: 466 - protein, 9 aa, Homo sapiens
EETAKKVRR

SEQ ID NO: 467 - protein, 9 aa, Homo sapiens
ERAKNKIAK

SEQ ID NO: 468 - protein, 9 aa, Homo sapiens
ETAKKVRRA

SEQ ID NO: 469 - protein, 9 aa, Homo sapiens
ELTLGEFLK

SEQ ID NO: 470 - protein, 9 aa, Homo sapiens
LPPAWQPFL

SEQ ID NO: 471 - protein, 9 aa, Homo sapiens
CPTENEPDL

SEQ ID NO: 472 - protein, 9 aa, Homo sapiens
EPDLAQCFF

SEQ ID NO: 473 - protein, 9 aa, Homo sapiens
APTLPPAWQ

SEQ ID NO: 474 - protein, 9 aa, Homo sapiens
QPFLKDHRI

SEQ ID NO: 475 - protein, 9 aa, Homo sapiens
KHSSGCAFL

SEQ ID NO: 476 - protein, 9 aa, Homo sapiens
LTLGEFLKL

SEQ ID NO: 477 - protein, 10 aa, Homo sapiens
WPFLEGCACT

SEQ ID NO: 478 - protein, 10 aa, Homo sapiens
TPERMAEAGF

SEQ ID NO: 479 - protein, 10 aa, Homo sapiens
CPTENEPDLA

SEQ ID NO: 480 - protein, 9 aa, Homo sapiens
RAKNKIAKE

SEQ ID NO: 481 - protein, 9 aa, Homo sapiens
QPFLKDHRI

SEQ ID NO: 482 - protein, 9 aa, Homo sapiens
SVKKQFEEL

SEQ ID NO: 483 - protein, 9 aa, Homo sapiens
NNKKKEFEE

SEQ ID NO: 484 - protein, 9 aa, Homo sapiens
TAKKVRRAI

SEQ ID NO: 485 - protein, 8 aa, Homo sapiens
AKKVRRAI

SEQ ID NO: 486 - protein, 8 aa, Homo sapiens
FLSVKKQF

SEQ ID NO: 487 - protein, 8 aa, Homo sapiens
RAKNKIAK

SEQ ID NO: 488 - protein, 8 aa, Homo sapiens
RERAKNKI

SEQ ID NO: 489 - protein, 8 aa, Homo sapiens
VKKQFEEL

SEQ ID NO: 490 - protein, 10 aa, Homo sapiens
FLKDHRISTF

SEQ ID NO: 491 - protein, 10 aa, Homo sapiens
KQFEELTLGE

SEQ ID NO: 492 - protein, 10 aa, Homo sapiens
TLPPAWQPFL

SEQ ID NO: 493 - protein, 10 aa, Homo sapiens
ELEGWEPDDD

SEQ ID NO: 494 - skipped

SEQ ID NO: 495 - protein, 10 aa, Homo sapiens
TLGEFLKLDR

SEQ ID NO: 496 - protein, 9 aa, Homo sapiens
TLPPAWQPF

SEQ ID NO: 497 - protein, 9 aa, Homo sapiens
DLAQCFFCF

SEQ ID NO: 498 - protein, 9 aa, Homo sapiens
KQFEELTLG

SEQ ID NO: 499 - protein, 9 aa, Homo sapiens
FLKDHRIST

SEQ ID NO: 500 - protein, 9 aa, Homo sapiens
KVRRAIEQL

SEQ ID NO: 501 - protein, 9 aa, Homo sapiens
EELTLGEFL

SEQ ID NO: 502 - protein, 9 aa, Homo sapiens
FEELTLGEF

SEQ ID NO: 503 - protein, 9 aa, Homo sapiens
NEPDLAQCF

SEQ ID NO: 504 - protein, 9 aa, Homo sapiens
PERMAEAGF

SEQ ID NO: 505 - protein, 9 aa, Homo sapiens
DLAQCFFCF

SEQ ID NO: 506 - protein, 9 aa, Homo sapiens
KELEGWEPD

SEQ ID NO: 507 - protein, 8 aa, Homo sapiens
EELTLGEF

SEQ ID NO: 508 - protein, 8 aa, Homo sapiens
EEHKKHSS

SEQ ID NO: 509 - protein, 8 aa, Homo sapiens
KELEGWEP

SEQ ID NO: 510 - protein, 8 aa, Homo sapiens
KQFEELTL

SEQ ID NO: 511 - protein, 10 aa, Homo sapiens
RRAIEQLAAM

SEQ ID NO: 512 - protein, 10 aa, Homo sapiens
GEFLKLDRER

SEQ ID NO: 513 - protein, 10 aa, Homo sapiens
ERMAEAGFIH

SEQ ID NO: 514 - protein, 10 aa, Homo sapiens
ERAKNKIAKE

SEQ ID NO: 515 - protein, 10 aa, Homo sapiens
KIAKETNNKK

SEQ ID NO: 516 - protein, 9 aa, Homo sapiens
ERAKNKIAK

SEQ ID NO: 517 - protein, 9 aa, Homo sapiens
DRERAKNKI

SEQ ID NO: 518 - protein, 9 aa, Homo sapiens
KEFEETAKK

SEQ ID NO: 519 - protein, 9 aa, Homo sapiens
ERMAEAGFI

SEQ ID NO: 520 - protein, 9 aa, Homo sapiens
GCAFLSVKK

SEQ ID NO: 521 - protein, 10 aa, Homo sapiens
TPERMAEAGF

SEQ ID NO: 522 - protein, 10 aa, Homo sapiens
LPPAWQPFLK

SEQ ID NO: 523 - protein, 10 aa, Homo sapiens
EPDDDPIEEH

SEQ ID NO: 524 - protein, 10 aa, Homo sapiens
LSVKKQFEEL

SEQ ID NO: 525 - protein, 9 aa, Homo sapiens
LPPAWQPFL

SEQ ID NO: 526 - protein, 9 aa, Homo sapiens
CPTENEPDL

SEQ ID NO: 527 - protein, 9 aa, Homo sapiens
EPDLAQCFF

SEQ ID NO: 528 - protein, 9 aa, Homo sapiens
QPFLKDHRI

SEQ ID NO: 529 - protein, 9 aa, Homo sapiens
TPERMAEAG

SEQ ID NO: 530 - protein, 9 aa, Homo sapiens
EPDDDPIEE

SEQ ID NO: 531 - protein, 10 aa, Homo sapiens
ETAKKVRRAI

SEQ ID NO: 532 - protein, 10 aa, Homo sapiens
PTLPPAWQPF

SEQ ID NO: 533 - protein, 10 aa, Homo sapiens
ISTFKNWPFL

SEQ ID NO: 534 - protein, 10 aa, Homo sapiens
LSVKKQFEEL

SEQ ID NO: 535 - protein, 9 aa, Homo sapiens
TAKKVRRAI

SEQ ID NO: 536 - protein, 9 aa, Homo sapiens
RAIEQLAAM

SEQ ID NO: 537 - protein, 9 aa, Homo sapiens
KVRRAIEQL

SEQ ID NO: 538 - protein, 9 aa, Homo sapiens
ISTFKNWPF

SEQ ID NO: 539 - protein, 9 aa, Homo sapiens
LTLGEFLKL

SEQ ID NO: 540 - protein, 9 aa, Homo sapiens
GAPTLPPAW

SEQ ID NO: 541 - protein, 15 aa, Homo sapiens
FFCFKELEGWEPDDD

SEQ ID NO: 542 - protein, 15 aa, Homo sapiens
FKNWPFLEGCACTPE

SEQ ID NO: 543 - protein, 15 aa, Homo sapiens
LGEFLKLDRERAKNK

SEQ ID NO: 544 - protein, 15 aa, Homo sapiens
NWPFLEGCACTPERM

SEQ ID NO: 545 - protein, 15 aa, Homo sapiens
KKQFEELTLGEFLKL

SEQ ID NO: 546 - protein, 15 aa, Homo sapiens
CTPERMAEAGFIHCP

SEQ ID NO: 547 - protein, 15 aa, Homo sapiens
FEELTLGEFLKLDRE

SEQ ID NO: 548 - protein, 15 aa, Homo sapiens
MGAPTLPPAWQPFLK

SEQ ID NO: 549 - protein, 15 aa, Homo sapiens
KKKEFEETAKKVRRA

SEQ ID NO: 550 - protein, 15 aa, Homo sapiens
AKKVRRAIEQLAAMD

SEQ ID NO: 551 - protein, 15 aa, Homo sapiens
GEFLKLDRERAKNKI

SEQ ID NO: 552 - protein, 15 aa, Homo sapiens
WQPFLKDHRISTFKN

SEQ ID NO: 553 - protein, 15 aa, Homo sapiens
APTLPPAWQPFLKDH

SEQ ID NO: 554 - protein, 15 aa, Homo sapiens
DHRISTFKNWPFLEG

SEQ ID NO: 555 - protein, 15 aa, Homo sapiens
FEELTLGEFLKLDRE

SEQ ID NO: 556 - protein, 15 aa, Homo sapiens
PTENEPDLAQCFFCF

SEQ ID NO: 557 - protein, 15 aa, Homo sapiens
QPFLKDHRISTFKNW

SEQ ID NO: 558 - protein, 15 aa, Homo sapiens
GCAFLSVKKQFEELT

SEQ ID NO: 559 - protein, 15 aa, Homo sapiens
ELTLGEFLKLDRERA

SEQ ID NO: 560 - protein, 15 aa, Homo sapiens
AKKVRRAIEQLAAMD

SEQ ID NO: 561 - protein, 15 aa, Homo sapiens
WQPFLKDHRISTFKN

SEQ ID NO: 562 - protein, 15 aa, Homo sapiens
LGEFLKLDRERAKNK

SEQ ID NO: 563 - protein, 15 aa, Homo sapiens
APTLPPAWQPFLKDH

SEQ ID NO: 564 - protein, 15 aa, Homo sapiens
KNKIAKETNNKKKEF

SEQ ID NO: 565 - protein, 15 aa, Homo sapiens
DHRISTFKNWPFLEG

SEQ ID NO: 566 - protein, 15 aa, Homo sapiens
GEFLKLDRERAKNKI

SEQ ID NO: 567 - protein, 15 aa, Homo sapiens
FLKLDRERAKNKIAK

SEQ ID NO: 568 - protein, 15 aa, Homo sapiens
AKKVRRAIEQLAAMD

SEQ ID NO: 569 - protein, 15 aa, Homo sapiens
FLKDHRISTFKNWPF

SEQ ID NO: 570 - protein, 15 aa, Homo sapiens
RMAEAGFIHCPTENE

SEQ ID NO: 571 - protein, 15 aa, Homo sapiens
AKKVRRAIEQLAAMD

SEQ ID NO: 572 - protein, 15 aa, Homo sapiens
APTLPPAWQPFLKDH

SEQ ID NO: 573 - protein, 15 aa, Homo sapiens
DHRISTFKNWPFLEG

SEQ ID NO: 574 - protein, 15 aa, Homo sapiens
LEGCACTPERMAEAG

SEQ ID NO: 575 - protein, 15 aa, Homo sapiens
EAGFIHCPTENEPDL

SEQ ID NO: 576 - protein, 15 aa, Homo sapiens
KKEFEETAKKVRRAI

SEQ ID NO: 577 - protein, 15 aa, Homo sapiens
AQCFFCFKELEGWEP

SEQ ID NO: 578 - protein, 15 aa, Homo sapiens
QCFFCFKELEGWEPD

SEQ ID NO: 579 - protein, 15 aa, Homo sapiens
LEGWEPDDDPIEEHK

SEQ ID NO: 580 - protein, 15 aa, Homo sapiens
KKQFEELTLGEFLKL

SEQ ID NO: 581 - protein, 15 aa, Homo sapiens
LGEFLKLDRERAKNK

SEQ ID NO: 582 - protein, 15 aa, Homo sapiens
GCAFLSVKKQFEELT

SEQ ID NO: 583 - protein, 15 aa, Homo sapiens
FFCFKELEGWEPDDD

SEQ ID NO: 584 - protein, 15 aa, Homo sapiens
DDPIEEHKKHSSGCA

SEQ ID NO: 585 - protein, 15 aa, Homo sapiens
KKEFEETAKKVRRAI

SEQ ID NO: 586 - protein, 15 aa, Homo sapiens
PPAWQPFLKDHRIST

SEQ ID NO: 587 - protein, 15 aa, Homo sapiens
WQPFLKDHRISTFKN

SEQ ID NO: 588 - protein, 15 aa, Homo sapiens
AWQPFLKDHRISTFK

SEQ ID NO: 589 - protein, 15 aa, Homo sapiens
AQCFFCFKELEGWEP

SEQ ID NO: 590 - protein, 15 aa, Homo sapiens
ISTFKNWPFLEGCAC

SEQ ID NO: 591 - protein, 15 aa, Homo sapiens
LGEFLKLDRERAKNK

SEQ ID NO: 592 - protein, 15 aa, Homo sapiens
GCAFLSVKKQFEELT

SEQ ID NO: 593 - protein, 15 aa, Homo sapiens
FFCFKELEGWEPDDD

SEQ ID NO: 594 - protein, 15 aa, Homo sapiens
DDPIEEHKKHSSGCA

SEQ ID NO: 595 - protein, 15 aa, Homo sapiens
KKEFEETAKKVRRAI

SEQ ID NO: 596 - protein, 15 aa, Homo sapiens
PPAWQPFLKDHRIST

SEQ ID NO: 597 - protein, 15 aa, Homo sapiens
WQPFLKDHRISTFKN

SEQ ID NO: 598 - protein, 15 aa, Homo sapiens
AWQPFLKDHRISTFK

SEQ ID NO: 599 - protein, 15 aa, Homo sapiens
AQCFFCFKELEGWEP

SEQ ID NO: 600 - protein, 15 aa, Homo sapiens
ISTFKNWPFLEGCAC

SEQ ID NO: 601 - protein, 180 aa, Homo sapiens
MQAEGRGTGGSTGDADGPGGPGIPDGPGGNAGGPGEAGATGGRGPRGAGAARASGPGGGAPRGPHGGAASGLNGCCRCGARGPESRLLEFYLAMPFATPMEAELARRSLAQDAPPLPVPGVLLKEFTVSGNILTIRLTAADHRQLQLSISSCLQQLSLLMWITQCFLPVFLAQPPSGQRR

SEQ ID NO: 602 - protein, 11 aa, Homo sapiens
RGPESRLLEFY

SEQ ID NO: 603 - protein, 11 aa, Homo sapiens
AADHRQLQLSI

SEQ ID NO: 604 - protein, 11 aa, Homo sapiens
EAELARRSLAQ

SEQ ID NO: 605 - protein, 10 aa, Homo sapiens
GPESRLLEFY

SEQ ID NO: 606 - protein, 10 aa, Homo sapiens
AQDAPPLPVP

SEQ ID NO: 607 - protein, 10 aa, Homo sapiens
AADHRQLQLS

SEQ ID NO: 608 - protein, 10 aa, Homo sapiens
EAELARRSLA

SEQ ID NO: 609 - protein, 9 aa, Homo sapiens
PESRLLEFY

SEQ ID NO: 610 - protein, 9 aa, Homo sapiens
AQDAPPLPV

SEQ ID NO: 611 - protein, 9 aa, Homo sapiens
AADHRQLQL

SEQ ID NO: 612 - protein, 10 aa, Homo sapiens
LLMWITQCFL

SEQ ID NO: 613 - protein, 10 aa, Homo sapiens
DAPPLPVPGV

SEQ ID NO: 614 - protein, 10 aa, Homo sapiens
RLLEFYLAMP

SEQ ID NO: 615 - protein, 10 aa, Homo sapiens
FTVSGNILTI

SEQ ID NO: 616 - protein, 10 aa, Homo sapiens
QLQLSISSCL

SEQ ID NO: 617 - protein, 9 aa, Homo sapiens
SLAQDAPPL

SEQ ID NO: 618 - protein, 9 aa, Homo sapiens
SISSCLQQL

SEQ ID NO: 619 - protein, 9 aa, Homo sapiens
RLLEFYLAM

SEQ ID NO: 620 - protein, 9 aa, Homo sapiens
TVSGNILTI

SEQ ID NO: 621 - protein, 9 aa, Homo sapiens
LMWITQCFL

SEQ ID NO: 622 - protein, 10 aa, Homo sapiens
PLPVPGVLLK

SEQ ID NO: 623 - protein, 10 aa, Homo sapiens
RLLEFYLAMP

SEQ ID NO: 624 - protein, 10 aa, Homo sapiens
ELARRSLAQD

SEQ ID NO: 625 - protein, 10 aa, Homo sapiens
TIRLTAADHR

SEQ ID NO: 626 - protein, 10 aa, Homo sapiens
RLTAADHRQL

SEQ ID NO: 627 - protein, 10 aa, Homo sapiens
QLSISSCLQQ

SEQ ID NO: 628 - protein, 10 aa, Homo sapiens
FLAQPPSGQR

SEQ ID NO: 629 - protein, 9 aa, Homo sapiens
TIRLTAADH

SEQ ID NO: 630 - protein, 9 aa, Homo sapiens
RLLEFYLAM

SEQ ID NO: 631 - protein, 9 aa, Homo sapiens
ELARRSLAQ

SEQ ID NO: 632 - protein, 10 aa, Homo sapiens
ATPMEAELAR

SEQ ID NO: 633 - protein, 10 aa, Homo sapiens
PLPVPGVLLK

SEQ ID NO: 634 - protein, 10 aa, Homo sapiens
ASGPGGGAPR

SEQ ID NO: 635 - protein, 10 aa, Homo sapiens
TVSGNILTIR

SEQ ID NO: 636 - protein, 10 aa, Homo sapiens
GVLLKEFTVS

SEQ ID NO: 637 - protein, 9 aa, Homo sapiens
ASGLNGCCR

SEQ ID NO: 638 - protein, 9 aa, Homo sapiens
LPVPGVLLK

SEQ ID NO: 639 - protein, 9 aa, Homo sapiens
VSGNILTIR

SEQ ID NO: 640 - protein, 9 aa, Homo sapiens
FTVSGNILT

SEQ ID NO: 641 - protein, 9 aa, Homo sapiens
SSCLQQLSL

SEQ ID NO: 642 - protein, 10 aa, Homo sapiens
PFATPMEAEL

SEQ ID NO: 643 - protein, 10 aa, Homo sapiens
PPLPVPGVLL

SEQ ID NO: 644 - protein, 10 aa, Homo sapiens
RGPESRLLEF

SEQ ID NO: 645 - protein, 10 aa, Homo sapiens
FYLAMPFATP

SEQ ID NO: 646 - protein, 10 aa, Homo sapiens
APPLPVPGVL

SEQ ID NO: 647 - protein, 9 aa, Homo sapiens
EFTVSGNIL

SEQ ID NO: 648 - protein, 9 aa, Homo sapiens
PPLPVPGVL

SEQ ID NO: 649 - protein, 9 aa, Homo sapiens
FYLAMPFAT

SEQ ID NO: 650 - protein, 9 aa, Homo sapiens
PLPVPGVLL

SEQ ID NO: 651 - protein, 9 aa, Homo sapiens
SCLQQLSLL

SEQ ID NO: 652 - protein, 10 aa, Homo sapiens
PVPGVLLKEF

SEQ ID NO: 653 - protein, 10 aa, Homo sapiens
FTVSGNILTI

SEQ ID NO: 654 - protein, 10 aa, Homo sapiens
LSISSCLQQL

SEQ ID NO: 655 - protein, 10 aa, Homo sapiens
WITQCFLPVF

SEQ ID NO: 656 - protein, 9 aa, Homo sapiens
EFTVSGNIL

SEQ ID NO: 657 - protein, 9 aa, Homo sapiens
ITQCFLPVF

SEQ ID NO: 658 - protein, 9 aa, Homo sapiens
ESRLLEFYL

SEQ ID NO: 659 - protein, 9 aa, Homo sapiens
EAELARRSL

SEQ ID NO: 660 - protein, 9 aa, Homo sapiens
SISSCLQQL

SEQ ID NO: 661 - protein, 9 aa, Homo sapiens
TVSGNILTI

SEQ ID NO: 662 - protein, 11 aa, Homo sapiens
ATPMEAELARR

SEQ ID NO: 663 - protein, 11 aa, Homo sapiens
FTVSGNILTIR

SEQ ID NO: 664 - protein, 11 aa, Homo sapiens
EAGATGGRGPR

SEQ ID NO: 665 - protein, 11 aa, Homo sapiens
LTIRLTAADHR

SEQ ID NO: 666 - protein, 11 aa, Homo sapiens
RASGPGGGAPR

SEQ ID NO: 667 - protein, 10 aa, Homo sapiens
TVSGNILTIR

SEQ ID NO: 668 - protein, 10 aa, Homo sapiens
ASGPGGGAPR

SEQ ID NO: 669 - protein, 10 aa, Homo sapiens
ATPMEAELAR

SEQ ID NO: 670 - protein, 9 aa, Homo sapiens
VSGNILTIR

SEQ ID NO: 671 - protein, 9 aa, Homo sapiens
PMEAELARR

SEQ ID NO: 672 - protein, 10 aa, Homo sapiens
APRGPHGGAA

SEQ ID NO: 673 - protein, 10 aa, Homo sapiens
APPLPVPGVL

SEQ ID NO: 674 - protein, 10 aa, Homo sapiens
PPLPVPGVLL

SEQ ID NO: 675 - protein, 10 aa, Homo sapiens
GPHGGAASGL

SEQ ID NO: 676 - protein, 10 aa, Homo sapiens
GPRGAGAARA

SEQ ID NO: 677 - protein, 9 aa, Homo sapiens
APRGPHGGA

SEQ ID NO: 678 - protein, 9 aa, Homo sapiens
IPDGPGGNA

SEQ ID NO: 679 - protein, 9 aa, Homo sapiens
APPLPVPGV

SEQ ID NO: 680 - protein, 9 aa, Homo sapiens
PPLPVPGVL

SEQ ID NO: 681 - protein, 9 aa, Homo sapiens
GPGGPGIPD

SEQ ID NO: 682 - protein, 9 aa, Homo sapiens
GPESRLLEF

SEQ ID NO: 683 - protein, 9 aa, Homo sapiens
AADHRQLQL

SEQ ID NO: 684 - protein, 9 aa, Homo sapiens
GARGPESRL

SEQ ID NO: 685 - protein, 9 aa, Homo sapiens
ESRLLEFYL

SEQ ID NO: 686 - protein, 9 aa, Homo sapiens
LLKEFTVSG

SEQ ID NO: 687 - protein, 9 aa, Homo sapiens
SLAQDAPPL

SEQ ID NO: 688 - protein, 9 aa, Homo sapiens
PLPVPGVLL

SEQ ID NO: 689 - protein, 8 aa, Homo sapiens
AELARRSL

SEQ ID NO: 690 - protein, 8 aa, Homo sapiens
LLKEFTVS

SEQ ID NO: 691 - protein, 8 aa, Homo sapiens
PLPVPGVL

SEQ ID NO: 692 - protein, 10 aa, Homo sapiens
SLLMWITQCF

SEQ ID NO: 693 - protein, 10 aa, Homo sapiens
PVPGVLLKEF

SEQ ID NO: 694 - protein, 10 aa, Homo sapiens
LLEFYLAMPF

SEQ ID NO: 695 - protein, 10 aa, Homo sapiens
RLLEFYLAMP

SEQ ID NO: 696 - protein, 10 aa, Homo sapiens
VLLKEFTVSG

SEQ ID NO: 697 - protein, 10 aa, Homo sapiens
MQAEGRGTGG

SEQ ID NO: 698 - protein, 10 aa, Homo sapiens
ILTIRLTAAD

SEQ ID NO: 699 - protein, 10 aa, Homo sapiens
RQLQLSISSC

SEQ ID NO: 700 - protein, 9 aa, Homo sapiens
LLMWITQCF

SEQ ID NO: 701 - protein, 9 aa, Homo sapiens
LLKEFTVSG

SEQ ID NO: 702 - protein, 9 aa, Homo sapiens
PESRLLEFY

SEQ ID NO: 703 - protein, 9 aa, Homo sapiens
LEFYLAMPF

SEQ ID NO: 704 - protein, 9 aa, Homo sapiens
MEAELARRS

SEQ ID NO: 705 - protein, 9 aa, Homo sapiens
ESRLLEFYL

SEQ ID NO: 706 - protein, 9 aa, Homo sapiens
VPGVLLKEF

SEQ ID NO: 707 - protein, 9 aa, Homo sapiens
ITQCFLPVF

SEQ ID NO: 708 - protein, 8 aa, Homo sapiens
PESRLLEF

SEQ ID NO: 709 - protein, 8 aa, Homo sapiens
AELARRSL

SEQ ID NO: 710 - protein, 8 aa, Homo sapiens
PGVLLKEF

SEQ ID NO: 711 - protein, 8 aa, Homo sapiens
MEAELARR

SEQ ID NO: 712 - protein, 10 aa, Homo sapiens
SRLLEFYLAM

SEQ ID NO: 713 - protein, 10 aa, Homo sapiens
RGPESRLLEF

SEQ ID NO: 714 - protein, 10 aa, Homo sapiens
RSLAQDAPPL

SEQ ID NO: 715 - protein, 10 aa, Homo sapiens
GPHGGAASGL

SEQ ID NO: 716 - protein, 10 aa, Homo sapiens
RRSLAQDAPP

SEQ ID NO: 717 - protein, 9 aa, Homo sapiens
ARGPESRLL

SEQ ID NO: 718 - protein, 9 aa, Homo sapiens
IRLTAADHR

SEQ ID NO: 719 - protein, 9 aa, Homo sapiens
GARGPESRL

SEQ ID NO: 720 - protein, 9 aa, Homo sapiens
GRGTGGSTG

SEQ ID NO: 721 - protein, 9 aa, Homo sapiens
GATGGRGPR

SEQ ID NO: 722 - protein, 10 aa, Homo sapiens
PPLPVPGVLL

SEQ ID NO: 723 - protein, 10 aa, Homo sapiens
GPESRLLEFY

SEQ ID NO: 724 - protein, 10 aa, Homo sapiens
GPHGGAASGL

SEQ ID NO: 725 - protein, 10 aa, Homo sapiens
APPLPVPGVL

SEQ ID NO: 726 - protein, 10 aa, Homo sapiens
MPFATPMEAE

SEQ ID NO: 727 - protein, 9 aa, Homo sapiens
PPLPVPGVL

SEQ ID NO: 728 - protein, 9 aa, Homo sapiens
GPESRLLEF

SEQ ID NO: 729 - protein, 9 aa, Homo sapiens
VPGVLLKEF

SEQ ID NO: 730 - protein, 9 aa, Homo sapiens
LQLSISSCL

SEQ ID NO: 731 - protein, 9 aa, Homo sapiens
LPVFLAQPP

SEQ ID NO: 732 - protein, 10 aa, Homo sapiens
RSLAQDAPPL

SEQ ID NO: 733 - protein, 10 aa, Homo sapiens
GARGPESRLL

SEQ ID NO: 734 - protein, 10 aa, Homo sapiens
FTVSGNILTI

SEQ ID NO: 735 - protein, 10 aa, Homo sapiens
LSISSCLQQL

SEQ ID NO: 736 - protein, 10 aa, Homo sapiens
SSCLQQLSLL

SEQ ID NO: 737 - protein, 10 aa, Homo sapiens
VSGNILTIRL

SEQ ID NO: 738 - protein, 10 aa, Homo sapiens
ISSCLQQLSL

SEQ ID NO: 739 - protein, 9 aa, Homo sapiens
EAELARRSL

SEQ ID NO: 740 - protein, 9 aa, Homo sapiens
LTAADHRQL

SEQ ID NO: 741 - protein, 9 aa, Homo sapiens
ESRLLEFYL

SEQ ID NO: 742 - protein, 15 aa, Homo sapiens
EFYLAMPFATPMEAE

SEQ ID NO: 743 - protein, 15 aa, Homo sapiens
SRLLEFYLAMPFATP

SEQ ID NO: 744 - protein, 15 aa, Homo sapiens
ATPMEAELARRSLAQ

SEQ ID NO: 745 - protein, 15 aa, Homo sapiens
GPGIPDGPGGNAGGP

SEQ ID NO: 746 - protein, 15 aa, Homo sapiens
LEFYLAMPFATPMEA

SEQ ID NO: 747 - protein, 15 aa, Homo sapiens
MPFATPMEAELARRS

SEQ ID NO: 748 - protein, 15 aa, Homo sapiens
LLMWITQCFLPVFLA

SEQ ID NO: 749 - protein, 15 aa, Homo sapiens
TQCFLPVFLAQPPSG

SEQ ID NO: 750 - protein, 15 aa, Homo sapiens
QCFLPVFLAQPPSGQ

SEQ ID NO: 751 - protein, 15 aa, Homo sapiens
YLAMPFATPMEAELA

SEQ ID NO: 752 - protein, 15 aa, Homo sapiens
LSLLMWITQCFLPVF

SEQ ID NO: 753 - protein, 15 aa, Homo sapiens
AMPFATPMEAELARR

SEQ ID NO: 754 - protein, 15 aa, Homo sapiens
QLSLLMWITQCFLPV

SEQ ID NO: 755 - protein, 15 aa, Homo sapiens
RRSLAQDAPPLPVPG

SEQ ID NO: 756 - protein, 15 aa, Homo sapiens
QLSISSCLQQLSLLM

SEQ ID NO: 757 - protein, 15 aa, Homo sapiens
SRLLEFYLAMPFATP

SEQ ID NO: 758 - protein, 15 aa, Homo sapiens
PLPVPGVLLKEFTVS

SEQ ID NO: 759 - protein, 15 aa, Homo sapiens
TIRLTAADHRQLQLS

SEQ ID NO: 760 - protein, 15 aa, Homo sapiens
HRQLQLSISSCLQQL

SEQ ID NO: 761 - protein, 15 aa, Homo sapiens
LMWITQCFLPVFLAQ

SEQ ID NO: 762 - protein, 15 aa, Homo sapiens
TIRLTAADHRQLQLS

SEQ ID NO: 763 - protein, 15 aa, Homo sapiens
LSLLMWITQCFLPVF

SEQ ID NO: 764 - protein, 15 aa, Homo sapiens
LLEFYLAMPFATPME

SEQ ID NO: 765 - protein, 15 aa, Homo sapiens
LKEFTVSGNILTIRL

SEQ ID NO: 766 - protein, 15 aa, Homo sapiens
ASGLNGCCRCGARGP

SEQ ID NO: 767 - protein, 15 aa, Homo sapiens
YLAMPFATPMEAELA

SEQ ID NO: 768 - protein, 15 aa, Homo sapiens
ATPMEAELARRSLAQ

SEQ ID NO: 769 - protein, 15 aa, Homo sapiens
PGVLLKEFTVSGNIL

SEQ ID NO: 770 - protein, 15 aa, Homo sapiens
GVLLKEFTVSGNILT

SEQ ID NO: 771 - protein, 15 aa, Homo sapiens
SGNILTIRLTAADHR

SEQ ID NO: 772 - protein, 15 aa, Homo sapiens
HRQLQLSISSCLQQL

SEQ ID NO: 773 - protein, 15 aa, Homo sapiens
AMPFATPMEAELARR

SEQ ID NO: 774 - protein, 15 aa, Homo sapiens
VLLKEFTVSGNILTI

SEQ ID NO: 775 - protein, 15 aa, Homo sapiens
LKEFTVSGNILTIRL

SEQ ID NO: 776 - protein, 15 aa, Homo sapiens
FTVSGNILTIRLTAA

SEQ ID NO: 777 - protein, 15 aa, Homo sapiens
TIRLTAADHRQLQLS

SEQ ID NO: 778 - protein, 15 aa, Homo sapiens
QLSLLMWITQCFLPV

SEQ ID NO: 779 - protein, 15 aa, Homo sapiens
LSLLMWITQCFLPVF

SEQ ID NO: 780 - protein, 15 aa, Homo sapiens
YLAMPFATPMEAELA

SEQ ID NO: 781 - protein, 15 aa, Homo sapiens
SGNILTIRLTAADHR

SEQ ID NO: 782 - protein, 15 aa, Homo sapiens
LEFYLAMPFATPMEA

SEQ ID NO: 783 - protein, 15 aa, Homo sapiens
TQCFLPVFLAQPPSG

SEQ ID NO: 784 - protein, 15 aa, Homo sapiens
ASGLNGCCRCGARGP

SEQ ID NO: 785 - protein, 15 aa, Homo sapiens
SGNILTIRLTAADHR

SEQ ID NO: 786 - protein, 15 aa, Homo sapiens
TIRLTAADHRQLQLS

SEQ ID NO: 787 - protein, 15 aa, Homo sapiens
MPFATPMEAELARRS

SEQ ID NO: 788 - protein, 15 aa, Homo sapiens
ATPMEAELARRSLAQ

SEQ ID NO: 789 - protein, 15 aa, Homo sapiens
TPMEAELARRSLAQD

SEQ ID NO: 790 - protein, 15 aa, Homo sapiens
PMEAELARRSLAQDA

SEQ ID NO: 791 - protein, 15 aa, Homo sapiens
LPVPGVLLKEFTVSG

SEQ ID NO: 792 - protein, 15 aa, Homo sapiens
SRLLEFYLAMPFATP

SEQ ID NO: 793 - protein, 15 aa, Homo sapiens
QCFLPVFLAQPPSGQ

SEQ ID NO: 794 - protein, 15 aa, Homo sapiens
ESRLLEFYLAMPFAT

SEQ ID NO: 795 - protein, 15 aa, Homo sapiens
YLAMPFATPMEAELA

SEQ ID NO: 796 - protein, 15 aa, Homo sapiens
PGVLLKEFTVSGNIL

SEQ ID NO: 797 - protein, 15 aa, Homo sapiens
GVLLKEFTVSGNILT

SEQ ID NO: 798 - protein, 15 aa, Homo sapiens
QLSLLMWITQCFLPV

SEQ ID NO: 799 - protein, 15 aa, Homo sapiens
MWITQCFLPVFLAQP

SEQ ID NO: 800 - protein, 15 aa, Homo sapiens
LLEFYLAMPFATPME

SEQ ID NO: 801 - protein, 15 aa, Homo sapiens
LKEFTVSGNILTIRL

SEQ ID NO: 802 - protein, 264 aa, Homo sapiens
MPLEQRSQHCKPEEGLEARGEALGLVGAQAPATEEQEAASSSSTLVEVTLGEVPAAESPDPPQSPQGASSLPTTMNYPLWSQSYEDSSNQEEEGPSTFPDLESEFQAALSRKVAELVHFLLLKYRAREPVTKAEMLGSVVGNWQYFFPVILLIIVLAIIAREGDCAPEEKIWEELSVLEVFEGREDSILGDPKKLLTQHFVQENYLEYRQVPGSDPACYEFLWGPRALVETSYVKVLHHMVKISGGPHISYPPLHEWVLREGEE

SEQ ID NO: 803 - protein, 11 aa, Homo sapiens
LMEVDPIGHLY

SEQ ID NO: 804 - protein, 11 aa, Homo sapiens
AELVHFLLLKY

SEQ ID NO: 805 - protein, 11 aa, Homo sapiens
QHFVQENYLEY

SEQ ID NO: 806 - protein, 10 aa, Homo sapiens
ASSLPTTMNY

SEQ ID NO: 807 - protein, 10 aa, Homo sapiens
ELVHFLLLKY

SEQ ID NO: 808 - protein, 10 aa, Homo sapiens
LTQHFVQENY

SEQ ID NO: 809 - protein, 9 aa, Homo sapiens
EVDPIGHLY

SEQ ID NO: 810 - protein, 9 aa, Homo sapiens
SSLPTTMNY

SEQ ID NO: 811 - protein, 9 aa, Homo sapiens
LVHFLLLKY

SEQ ID NO: 812 - protein, 9 aa, Homo sapiens
GSVVGNWQY

SEQ ID NO: 813 - protein, 10 aa, Homo sapiens
TLVEVTLGEV

SEQ ID NO: 814 - protein, 10 aa, Homo sapiens
ALVETSYVKV

SEQ ID NO: 815 - protein, 10 aa, Homo sapiens
GLLIIVLAII

SEQ ID NO: 816 - protein, 10 aa, Homo sapiens
AALSRKVAEL

SEQ ID NO: 817 - protein, 10 aa, Homo sapiens
LVFGIELMEV

SEQ ID NO: 818 - protein, 9 aa, Homo sapiens
ALSRKVAEL

SEQ ID NO: 819 - protein, 9 aa, Homo sapiens
LLIIVLAII

SEQ ID NO: 820 - protein, 9 aa, Homo sapiens
GLLIIVLAI

SEQ ID NO: 821 - protein, 9 aa, Homo sapiens
FLWGPRALV

SEQ ID NO: 822 - protein, 9 aa, Homo sapiens
KIWEELSVL

SEQ ID NO: 823 - protein, 10 aa, Homo sapiens
KYRAREPVTK

SEQ ID NO: 824 - protein, 10 aa, Homo sapiens
YVKVLHHMVK

SEQ ID NO: 825 - protein, 10 aa, Homo sapiens
QVPGSDPACY

SEQ ID NO: 826 - protein, 10 aa, Homo sapiens
LLGDNQIMPK

SEQ ID NO: 827 - protein, 10 aa, Homo sapiens
KLLTQHFVQE

SEQ ID NO: 828 - protein, 10 aa, Homo sapiens
FLWGPRALVE

SEQ ID NO: 829 - protein, 9 aa, Homo sapiens
ALVETSYVK

SEQ ID NO: 830 - protein, 9 aa, Homo sapiens
ALGLVGAQA

SEQ ID NO: 831 - protein, 9 aa, Homo sapiens
ELVHFLLLK

SEQ ID NO: 832 - protein, 9 aa, Homo sapiens
YRAREPVTK

SEQ ID NO: 833 - protein, 10 aa, Homo sapiens
ESEFQAALSR

SEQ ID NO: 834 - protein, 10 aa, Homo sapiens
YVKVLHHMVK

SEQ ID NO: 835 - protein, 10 aa, Homo sapiens
AELVHFLLLK

SEQ ID NO: 836 - protein, 10 aa, Homo sapiens
LIIVLAIIAR

SEQ ID NO: 837 - protein, 10 aa, Homo sapiens
ASSSSTLVEV

SEQ ID NO: 838 - protein, 10 aa, Homo sapiens
STLVEVTLGE

SEQ ID NO: 839 - protein, 9 aa, Homo sapiens
ELVHFLLLK

SEQ ID NO: 840 - protein, 9 aa, Homo sapiens
SVLEVFEGR

SEQ ID NO: 841 - protein, 9 aa, Homo sapiens
DSILGDPKK

SEQ ID NO: 842 - protein, 9 aa, Homo sapiens
ALVETSYVK

SEQ ID NO: 843 - protein, 10 aa, Homo sapiens
SYPPLHEWVL

SEQ ID NO: 844 - protein, 10 aa, Homo sapiens
LYIFATCLGL

SEQ ID NO: 845 - protein, 10 aa, Homo sapiens
VFEGREDSIL

SEQ ID NO: 846 - protein, 10 aa, Homo sapiens
KVAELVHFLL

SEQ ID NO: 847 - protein, 9 aa, Homo sapiens
TFPDLESEF

SEQ ID NO: 848 - protein, 9 aa, Homo sapiens
VFEGREDSI

SEQ ID NO: 849 - protein, 9 aa, Homo sapiens
EFLWGPRAL

SEQ ID NO: 850 - protein, 9 aa, Homo sapiens
VAELVHFLL

SEQ ID NO: 851 - protein, 9 aa, Homo sapiens
IFSKASSSL

SEQ ID NO: 852 - protein, 9 aa, Homo sapiens
AELVHFLLL

SEQ ID NO: 853 - protein, 10 aa, Homo sapiens
ELVHFLLLKY

SEQ ID NO: 854 - protein, 10 aa, Homo sapiens
EKIWEELSVL

SEQ ID NO: 855 - protein, 10 aa, Homo sapiens
EVFEGREDSI

SEQ ID NO: 856 - protein, 10 aa, Homo sapiens
EVTLGEVPAA

SEQ ID NO: 857 - protein, 9 aa, Homo sapiens
EVDPIGHLY

SEQ ID NO: 858 - protein, 9 aa, Homo sapiens
LVHFLLLKY

SEQ ID NO: 859 - protein, 9 aa, Homo sapiens
EVFEGREDS

SEQ ID NO: 860 - protein, 9 aa, Homo sapiens
KVAELVHFL

SEQ ID NO: 861 - protein, 9 aa, Homo sapiens
EPVTKAEML

SEQ ID NO: 862 - protein, 9 aa, Homo sapiens
SVVGNWQYF

SEQ ID NO: 863 - protein, 11 aa, Homo sapiens
LLIIVLAIIAR

SEQ ID NO: 864 - protein, 11 aa, Homo sapiens
ELVHFLLLKYR

SEQ ID NO: 865 - protein, 11 aa, Homo sapiens
ELSVLEVFEGR

SEQ ID NO: 866 - protein, 10 aa, Homo sapiens
LIIVLAIIAR

SEQ ID NO: 867 - protein, 10 aa, Homo sapiens
ESEFQAALSR

SEQ ID NO: 868 - protein, 9 aa, Homo sapiens
IIVLAIIAR

SEQ ID NO: 869 - protein, 9 aa, Homo sapiens
ELVHFLLLK

SEQ ID NO: 870 - protein, 9 aa, Homo sapiens
IVLAIIARE

SEQ ID NO: 871 - protein, 9 aa, Homo sapiens
SVLEVFEGR

SEQ ID NO: 872 - protein, 9 aa, Homo sapiens
DSILGDPKK

SEQ ID NO: 873 - protein, 10 aa, Homo sapiens
APEEKIWEEL

SEQ ID NO: 874 - protein, 10 aa, Homo sapiens
SPQGASSLPT

SEQ ID NO: 875 - protein, 10 aa, Homo sapiens
APATEEQEAA

SEQ ID NO: 876 - protein, 10 aa, Homo sapiens
DPIGHLYIFA

SEQ ID NO: 877 - protein, 9 aa, Homo sapiens
GPHISYPPL

SEQ ID NO: 878 - protein, 9 aa, Homo sapiens
LPTTMNYPL

SEQ ID NO: 879 - protein, 9 aa, Homo sapiens
EPVTKAEML

SEQ ID NO: 880 - protein, 9 aa, Homo sapiens
YPPLHEWVL

SEQ ID NO: 881 - protein, 9 aa, Homo sapiens
APATEEQEA

SEQ ID NO: 882 - protein, 9 aa, Homo sapiens
MPKAGLLII

SEQ ID NO: 883 - protein, 9 aa, Homo sapiens
ALSRKVAEL

SEQ ID NO: 884 - protein, 9 aa, Homo sapiens
EPVTKAEML

SEQ ID NO: 885 - protein, 9 aa, Homo sapiens
GLEARGEAL

SEQ ID NO: 886 - protein, 9 aa, Homo sapiens
LLKYRAREP

SEQ ID NO: 887 - protein, 9 aa, Homo sapiens
QIMPKAGLL

SEQ ID NO: 888 - protein, 9 aa, Homo sapiens
EARGEALGL

SEQ ID NO: 889 - protein, 9 aa, Homo sapiens
MPKAGLLII

SEQ ID NO: 890 - protein, 8 aa, Homo sapiens
LLKYRARE

SEQ ID NO: 891 - protein, 8 aa, Homo sapiens
QIMPKAGL

SEQ ID NO: 892 - protein, 8 aa, Homo sapiens
EEKIWEEL

SEQ ID NO: 893 - protein, 10 aa, Homo sapiens
NQEEEGPSTF

SEQ ID NO: 894 - protein, 10 aa, Homo sapiens
ELVHFLLLKY

SEQ ID NO: 895 - protein, 10 aa, Homo sapiens
QVPGSDPACY

SEQ ID NO: 896 - protein, 10 aa, Homo sapiens
SVVGNWQYFF

SEQ ID NO: 897 - protein, 9 aa, Homo sapiens
TQHFVQENY

SEQ ID NO: 898 - protein, 9 aa, Homo sapiens
LVHFLLLKY

SEQ ID NO: 899 - protein, 9 aa, Homo sapiens
FVQENYLEY

SEQ ID NO: 900 - protein, 9 aa, Homo sapiens
WQYFFPVIF

SEQ ID NO: 901 - protein, 9 aa, Homo sapiens
EVDPIGHLY

SEQ ID NO: 902 - protein, 9 aa, Homo sapiens
VVGNWQYFF

SEQ ID NO: 903 - protein, 9 aa, Homo sapiens
EELSVLEVF

SEQ ID NO: 904 - protein, 9 aa, Homo sapiens
QEEEGPSTF

SEQ ID NO: 905 - protein, 9 aa, Homo sapiens
LESEFQAAL

SEQ ID NO: 906 - protein, 9 aa, Homo sapiens
PEEKIWEEL

SEQ ID NO: 907 - protein, 9 aa, Homo sapiens
AELVHFLLL

SEQ ID NO: 908 - protein, 9 aa, Homo sapiens
VETSYVKVL

SEQ ID NO: 909 - protein, 8 aa, Homo sapiens
EEEGPSTF

SEQ ID NO: 910 - protein, 8 aa, Homo sapiens
EEKIWEEL

SEQ ID NO: 911 - protein, 8 aa, Homo sapiens
AELVHFLL

SEQ ID NO: 912 - protein, 8 aa, Homo sapiens
LEARGEAL

SEQ ID NO: 913 - protein, 10 aa, Homo sapiens
AREPVTKAEM

SEQ ID NO: 914 - protein, 10 aa, Homo sapiens
SRKVAELVHF

SEQ ID NO: 915 - protein, 10 aa, Homo sapiens
SEFQAALSRK

SEQ ID NO: 916 - protein, 10 aa, Homo sapiens
RALVETSYVK

SEQ ID NO: 917 - protein, 9 aa, Homo sapiens
YRAREPVTK

SEQ ID NO: 918 - protein, 9 aa, Homo sapiens
PRALVETSY

SEQ ID NO: 919 - protein, 9 aa, Homo sapiens
SRKVAELVH

SEQ ID NO: 920 - protein, 9 aa, Homo sapiens
YFFPVIFSK

SEQ ID NO: 921 - protein, 9 aa, Homo sapiens
KAGLLIIVL

SEQ ID NO: 922 - protein, 9 aa, Homo sapiens
DSILGDPKK

SEQ ID NO: 923 - protein, 10 aa, Homo sapiens
APEEKIWEEL

SEQ ID NO: 924 - protein, 10 aa, Homo sapiens
GPRALVETSY

SEQ ID NO: 925 - protein, 10 aa, Homo sapiens
DPKKLLTQHF

SEQ ID NO: 926 - protein, 9 aa, Homo sapiens
EPVTKAEML

SEQ ID NO: 927 - protein, 9 aa, Homo sapiens
LPTTMNYPL

SEQ ID NO: 928 - protein, 9 aa, Homo sapiens
VPGSDPACY

SEQ ID NO: 929 - protein, 9 aa, Homo sapiens
YPPLHEWVL

SEQ ID NO: 930 - protein, 9 aa, Homo sapiens
GPHISYPPL

SEQ ID NO: 931 - protein, 9 aa, Homo sapiens
DPIGHLYIF

SEQ ID NO: 932 - protein, 9 aa, Homo sapiens
MPKAGLLII

SEQ ID NO: 933 - protein, 10 aa, Homo sapiens
KVAELVHFLL

SEQ ID NO: 934 - protein, 10 aa, Homo sapiens
KASSSLQLVF

SEQ ID NO: 935 - protein, 10 aa, Homo sapiens
SSSTLVEVTL

SEQ ID NO: 936 - protein, 10 aa, Homo sapiens
FSKASSSLQL

SEQ ID NO: 937 - protein, 9 aa, Homo sapiens
KAGLLIIVL

SEQ ID NO: 938 - protein, 9 aa, Homo sapiens
KVAELVHFL

SEQ ID NO: 939 - protein, 9 aa, Homo sapiens
SSTLVEVTL

SEQ ID NO: 940 - protein, 9 aa, Homo sapiens
SSLQLVFGI

SEQ ID NO: 941 - protein, 9 aa, Homo sapiens
KVLHHMVKI

SEQ ID NO: 942 - protein, 9 aa, Homo sapiens
SSLPTTMNY

SEQ ID NO: 943 - protein, 15 aa, Homo sapiens
PACYEFLWGPRALVE

SEQ ID NO: 944 - protein, 15 aa, Homo sapiens
YLEYRQVPGSDPACY

SEQ ID NO: 945 - protein, 15 aa, Homo sapiens
AGLLIIVLAIIAREG

SEQ ID NO: 946 - protein, 15 aa, Homo sapiens
GEALGLVGAQAPATE

SEQ ID NO: 947 - protein, 15 aa, Homo sapiens
QYFFPVIFSKASSSL

SEQ ID NO: 948 - protein, 15 aa, Homo sapiens
SSSLQLVFGIELMEV

SEQ ID NO: 949 - protein, 15 aa, Homo sapiens
EVTLGEVPAAESPDP

SEQ ID NO: 950 - protein, 15 aa, Homo sapiens
HHMVKISGGPHISYP

SEQ ID NO: 951 - protein, 15 aa, Homo sapiens
HFLLLKYRAREPVTK

SEQ ID NO: 952 - protein, 15 aa, Homo sapiens
ETSYVKVLHHMVKIS

SEQ ID NO: 953 - protein, 15 aa, Homo sapiens
EDSILGDPKKLLTQH

SEQ ID NO: 954 - protein, 15 aa, Homo sapiens
IELMEVDPIGHLYIF

SEQ ID NO: 955 - protein, 15 aa, Homo sapiens
YDGLLGDNQIMPKAG

SEQ ID NO: 956 - protein, 15 aa, Homo sapiens
FPDLESEFQAALSRK

SEQ ID NO: 957 - protein, 15 aa, Homo sapiens
GPSTFPDLESEFQAA

SEQ ID NO: 958 - protein, 15 aa, Homo sapiens
LGSVVGNWQYFFPVI

SEQ ID NO: 959 - protein, 15 aa, Homo sapiens
ASSLPTTMNYPLWSQ

SEQ ID NO: 960 - protein, 15 aa, Homo sapiens
VAELVHFLLLKYRAR

SEQ ID NO: 961 - protein, 15 aa, Homo sapiens
CLGLSYDGLLGDNQI

SEQ ID NO: 962 - protein, 15 aa, Homo sapiens
SRKVAELVHFLLLKY

SEQ ID NO: 963 - protein, 15 aa, Homo sapiens
PSTFPDLESEFQAAL

SEQ ID NO: 964 - protein, 15 aa, Homo sapiens
ESEFQAALSRKVAEL

SEQ ID NO: 965 - protein, 15 aa, Homo sapiens
QYFFPVIFSKASSSL

SEQ ID NO: 966 - protein, 15 aa, Homo sapiens
PVIFSKASSSLQLVF

SEQ ID NO: 967 - protein, 15 aa, Homo sapiens
ETSYVKVLHHMVKIS

SEQ ID NO: 968 - protein, 15 aa, Homo sapiens
FPDLESEFQAALSRK

SEQ ID NO: 969 - protein, 15 aa, Homo sapiens
SRKVAELVHFLLLKY

SEQ ID NO: 970 - protein, 15 aa, Homo sapiens
LMEVDPIGHLYIFAT

SEQ ID NO: 971 - protein, 15 aa, Homo sapiens
TSYVKVLHHMVKISG

SEQ ID NO: 972 - protein, 15 aa, Homo sapiens
WQYFFPVIFSKASSS

SEQ ID NO: 973 - protein, 15 aa, Homo sapiens
ESEFQAALSRKVAEL

SEQ ID NO: 974 - protein, 15 aa, Homo sapiens
ASSLPTTMNYPLWSQ

SEQ ID NO: 975 - protein, 15 aa, Homo sapiens
ATCLGLSYDGLLGDN

SEQ ID NO: 976 - protein, 15 aa, Homo sapiens
QYFFPVIFSKASSSL

SEQ ID NO: 977 - protein, 15 aa, Homo sapiens
FPVIFSKASSSLQLV

SEQ ID NO: 978 - protein, 15 aa, Homo sapiens
PVIFSKASSSLQLVF

SEQ ID NO: 979 - protein, 15 aa, Homo sapiens
GHLYIFATCLGLSYD

SEQ ID NO: 980 - protein, 15 aa, Homo sapiens
LEVFEGREDSILGDP

SEQ ID NO: 981 - protein, 15 aa, Homo sapiens
PRALVETSYVKVLHH

SEQ ID NO: 982 - protein, 15 aa, Homo sapiens
HISYPPLHEWVLREG

SEQ ID NO: 983 - protein, 15 aa, Homo sapiens
VKVLHHMVKISGGPH

SEQ ID NO: 984 - protein, 15 aa, Homo sapiens
WQYFFPVIFSKASSS

SEQ ID NO: 985 - protein, 15 aa, Homo sapiens
PACYEFLWGPRALVE

SEQ ID NO: 986 - protein, 15 aa, Homo sapiens
ETSYVKVLHHMVKIS

SEQ ID NO: 987 - protein, 15 aa, Homo sapiens
SRKVAELVHFLLLKY

SEQ ID NO: 988 - protein, 15 aa, Homo sapiens
ELVHFLLLKYRAREP

SEQ ID NO: 989 - protein, 15 aa, Homo sapiens
QYFFPVIFSKASSSL

SEQ ID NO: 990 - protein, 15 aa, Homo sapiens
YLEYRQVPGSDPACY

SEQ ID NO: 991 - protein, 15 aa, Homo sapiens
TSYVKVLHHMVKISG

SEQ ID NO: 992 - protein, 15 aa, Homo sapiens
SEFQAALSRKVAELV

SEQ ID NO: 993 - protein, 15 aa, Homo sapiens
GSVVGNWQYFFPVIF

SEQ ID NO: 994 - protein, 15 aa, Homo sapiens
HFLLLKYRAREPVTK

SEQ ID NO: 995 - protein, 15 aa, Homo sapiens
IGHLYIFATCLGLSY

SEQ ID NO: 996 - protein, 15 aa, Homo sapiens
VAELVHFLLLKYRAR

SEQ ID NO: 997 - protein, 15 aa, Homo sapiens
SSSLQLVFGIELMEV

SEQ ID NO: 998 - protein, 15 aa, Homo sapiens
GIELMEVDPIGHLYI

SEQ ID NO: 999 - protein, 15 aa, Homo sapiens
TCLGLSYDGLLGDNQ

SEQ ID NO: 1000 - protein, 15 aa, Homo sapiens
DNQIMPKAGLLIIVL

SEQ ID NO: 1001 - protein, 15 aa, Homo sapiens
AGLLIIVLAIIAREG

SEQ ID NO: 1002 - protein, 15 aa, Homo sapiens
LSVLEVFEGREDSIL

SEQ ID NO: 1003 - protein, 317 aa, Homo sapiens
MSSEQKSQHCKPEEGVEAQEEALGLVGAQAPTTEEQEAAVSSSSPLVPGTLEEVPAAESAGPPQSPQGASALPTTISFTCWRQPNEGSSSQEEEGPSTSPDAESLFREALSNKVDELAHFLLRKYRAKELVTKAEMLERVIKNYKRCFPVIFGKASESLKMIFGIDVKEVDPASNTYTLVTCLGLSYDGLLGNNQIFPKTGLLIIVLGTIAMEGDSASEEEIWEELGVMGVYDGREHTVYGEPRKLLTQDWVQENYLEYRQVPGSNPARYEFLWGPRALAETSYVKVLEHVVRVNARVRIAYPSLREAALLEEEEGV

SEQ ID NO: 1004 - protein, 11 aa, Homo sapiens
YTLVTCLGLSY

SEQ ID NO: 1005 - protein, 11 aa, Homo sapiens
VKEVDPASNTY

SEQ ID NO: 1006 - protein, 11 aa, Homo sapiens
IWEELGVMGVY

SEQ ID NO: 1007 - protein, 11 aa, Homo sapiens
QDWVQENYLEY

SEQ ID NO: 1008 - protein, 10 aa, Homo sapiens
VYDGREHTVY

SEQ ID NO: 1009 - protein, 10 aa, Homo sapiens
WEELGVMGVY

SEQ ID NO: 1010 - protein, 10 aa, Homo sapiens
LTQDWVQENY

SEQ ID NO: 1011 - protein, 9 aa, Homo sapiens
EVDPASNTY

SEQ ID NO: 1012 - protein, 9 aa, Homo sapiens
TQDWVQENY

SEQ ID NO: 1013 - protein, 9 aa, Homo sapiens
MLERVIKNY

SEQ ID NO: 1014 - protein, 10 aa, Homo sapiens
ALAETSYVKV

SEQ ID NO: 1015 - protein, 10 aa, Homo sapiens
GLLIIVLGTI

SEQ ID NO: 1016 - protein, 10 aa, Homo sapiens
MIFGIDVKEV

SEQ ID NO: 1017 - protein, 10 aa, Homo sapiens
PLVPGTLEEV

SEQ ID NO: 1018 - protein, 10 aa, Homo sapiens
VIFGKASESL

SEQ ID NO: 1019 - protein, 9 aa, Homo sapiens
ALSNKVDEL

SEQ ID NO: 1020 - protein, 9 aa, Homo sapiens
LLIIVLGTI

SEQ ID NO: 1021 - protein, 9 aa, Homo sapiens
ALLEEEEGV

SEQ ID NO: 1022 - protein, 9 aa, Homo sapiens
KVLEHVVRV

SEQ ID NO: 1023 - protein, 9 aa, Homo sapiens
QIFPKTGLL

SEQ ID NO: 1024 - protein, 10 aa, Homo sapiens
SLFREALSNK

SEQ ID NO: 1025 - protein, 10 aa, Homo sapiens
KYRAKELVTK

SEQ ID NO: 1026 - protein, 10 aa, Homo sapiens
RVRIAYPSLR

SEQ ID NO: 1027 - protein, 10 aa, Homo sapiens
TLVTCLGLSY

SEQ ID NO: 1028 - protein, 10 aa, Homo sapiens
QVPGSNPARY

SEQ ID NO: 1029 - protein, 10 aa, Homo sapiens
HVVRVNARVR

SEQ ID NO: 1030 - protein, 9 aa, Homo sapiens
ALAETSYVK

SEQ ID NO: 1031 - protein, 9 aa, Homo sapiens
FLLRKYRAK

SEQ ID NO: 1032 - protein, 9 aa, Homo sapiens
ALGLVGAQA

SEQ ID NO: 1033 - protein, 9 aa, Homo sapiens
ELAHFLLRK

SEQ ID NO: 1034 - protein, 10 aa, Homo sapiens
TSPDAESLFR

SEQ ID NO: 1035 - protein, 10 aa, Homo sapiens
YVKVLEHVVR

SEQ ID NO: 1036 - protein, 10 aa, Homo sapiens
SSEQKSQHCK

SEQ ID NO: 1037 - protein, 10 aa, Homo sapiens
LVTKAEMLER

SEQ ID NO: 1038 - protein, 10 aa, Homo sapiens
RVRIAYPSLR

SEQ ID NO: 1039 - protein, 9 aa, Homo sapiens
VTKAEMLER

SEQ ID NO: 1040 - protein, 9 aa, Homo sapiens
ELAHFLLRK

SEQ ID NO: 1041 - protein, 9 aa, Homo sapiens
GVMGVYDGR

SEQ ID NO: 1042 - protein, 9 aa, Homo sapiens
TTISFTCWR

SEQ ID NO: 1043 - protein, 9 aa, Homo sapiens
ALAETSYVK

SEQ ID NO: 1044 - protein, 10 aa, Homo sapiens
AYPSLREAAL

SEQ ID NO: 1045 - protein, 10 aa, Homo sapiens
TYTLVTCLGL

SEQ ID NO: 1046 - protein, 10 aa, Homo sapiens
NYKRCFPVIF

SEQ ID NO: 1047 - protein, 10 aa, Homo sapiens
IFPKTGLLII

SEQ ID NO: 1048 - protein, 10 aa, Homo sapiens
KVDELAHFLL

SEQ ID NO: 1049 - protein, 9 aa, Homo sapiens
VYGEPRKLL

SEQ ID NO: 1050 - protein, 9 aa, Homo sapiens
NYKRCFPVI

SEQ ID NO: 1051 - protein, 9 aa, Homo sapiens
EFLWGPRAL

SEQ ID NO: 1052 - protein, 9 aa, Homo sapiens
IFGKASESL

SEQ ID NO: 1053 - protein, 10 aa, Homo sapiens
EMLERVIKNY

SEQ ID NO: 1054 - protein, 10 aa, Homo sapiens
EGVEAQEEAL

SEQ ID NO: 1055 - protein, 10 aa, Homo sapiens
ELAHFLLRKY

SEQ ID NO: 1056 - protein, 10 aa, Homo sapiens
EALSNKVDEL

SEQ ID NO: 1057 - protein, 10 aa, Homo sapiens
DWVQENYLEY

SEQ ID NO: 1058 - protein, 10 aa, Homo sapiens
ETSYVKVLEH

SEQ ID NO: 1059 - protein, 9 aa, Homo sapiens
EVDPASNTY

SEQ ID NO: 1060 - protein, 9 aa, Homo sapiens
LVTCLGLSY

SEQ ID NO: 1061 - protein, 9 aa, Homo sapiens
ELVTKAEML

SEQ ID NO: 1062 - protein, 9 aa, Homo sapiens
WVQENYLEY

SEQ ID NO: 1063 - protein, 11 aa, Homo sapiens
ELAHFLLRKYR

SEQ ID NO: 1064 - protein, 11 aa, Homo sapiens
STSPDAESLFR

SEQ ID NO: 1065 - protein, 11 aa, Homo sapiens
ELVTKAEMLER

SEQ ID NO: 1066 - protein, 10 aa, Homo sapiens
YVKVLEHVVR

SEQ ID NO: 1067 - protein, 10 aa, Homo sapiens
PTTISFTCWR

SEQ ID NO: 1068 - protein, 10 aa, Homo sapiens
LVTKAEMLER

SEQ ID NO: 1069 - protein, 9 aa, Homo sapiens
ELAHFLLRK

SEQ ID NO: 1070 - protein, 9 aa, Homo sapiens
TTISFTCWR

SEQ ID NO: 1071 - protein, 9 aa, Homo sapiens
GVMGVYDGR

SEQ ID NO: 1072 - protein, 9 aa, Homo sapiens
QVPGSNPAR

SEQ ID NO: 1073 - protein, 10 aa, Homo sapiens
YPSLREAALL

SEQ ID NO: 1074 - protein, 10 aa, Homo sapiens
SPQGASALPT

SEQ ID NO: 1075 - protein, 10 aa, Homo sapiens
VPGTLEEVPA

SEQ ID NO: 1076 - protein, 10 aa, Homo sapiens
APTTEEQEAA

SEQ ID NO: 1077 - protein, 10 aa, Homo sapiens
DPASNTYTLV

SEQ ID NO: 1078 - protein, 10 aa, Homo sapiens
PPQSPQGASA

SEQ ID NO: 1079 - protein, 9 aa, Homo sapiens
YPSLREAAL

SEQ ID NO: 1080 - protein, 9 aa, Homo sapiens
DPASNTYTL

SEQ ID NO: 1081 - protein, 9 aa, Homo sapiens
APTTEEQEA

SEQ ID NO: 1082 - protein, 9 aa, Homo sapiens
FPKTGLLII

SEQ ID NO: 1083 - protein, 9 aa, Homo sapiens
LRKYRAKEL

SEQ ID NO: 1084 - protein, 9 aa, Homo sapiens
ALSNKVDEL

SEQ ID NO: 1085 - protein, 9 aa, Homo sapiens
ELVTKAEML

SEQ ID NO: 1086 - protein, 9 aa, Homo sapiens
YPSLREAAL

SEQ ID NO: 1087 - protein, 9 aa, Homo sapiens
QIFPKTGLL

SEQ ID NO: 1088 - protein, 9 aa, Homo sapiens
VIKNYKRCF

SEQ ID NO: 1089 - protein, 8 aa, Homo sapiens
SLREAALL

SEQ ID NO: 1090 - protein, 8 aa, Homo sapiens
SLKMIFGI

SEQ ID NO: 1091 - protein, 8 aa, Homo sapiens
QIFPKTGL

SEQ ID NO: 1092 - protein, 8 aa, Homo sapiens
FPKTGLLI

SEQ ID NO: 1093 - protein, 10 aa, Homo sapiens
TLVTCLGLSY

SEQ ID NO: 1094 - protein, 10 aa, Homo sapiens
RVNARVRIAY

SEQ ID NO: 1095 - protein, 10 aa, Homo sapiens
ELAHFLLRKY

SEQ ID NO: 1096 - protein, 10 aa, Homo sapiens
QVPGSNPARY

SEQ ID NO: 1097 - protein, 10 aa, Homo sapiens
RVIKNYKRCF

SEQ ID NO: 1098 - protein, 9 aa, Homo sapiens
MLERVIKNY

SEQ ID NO: 1099 - protein, 9 aa, Homo sapiens
TQDWVQENY

SEQ ID NO: 1100 - protein, 9 aa, Homo sapiens
LVTCLGLSY

SEQ ID NO: 1101 - protein, 9 aa, Homo sapiens
WVQENYLEY

SEQ ID NO: 1102 - protein, 9 aa, Homo sapiens
EVDPASNTY

SEQ ID NO: 1103 - protein, 9 aa, Homo sapiens
AESLFREAL

SEQ ID NO: 1104 - protein, 9 aa, Homo sapiens
SEEEIWEEL

SEQ ID NO: 1105 - protein, 9 aa, Homo sapiens
EELGVMGVY

SEQ ID NO: 1106 - protein, 9 aa, Homo sapiens
AETSYVKVL

SEQ ID NO: 1107 - protein, 8 aa, Homo sapiens
DELAHFLL

SEQ ID NO: 1108 - protein, 8 aa, Homo sapiens
EEEIWEEL

SEQ ID NO: 1109 - protein, 8 aa, Homo sapiens
LERVIKNY

SEQ ID NO: 1110 - protein, 8 aa, Homo sapiens
SESLKMIF

SEQ ID NO: 1111 - protein, 8 aa, Homo sapiens
VEAQEEAL

SEQ ID NO: 1112 - protein, 8 aa, Homo sapiens
DGREHTVY

SEQ ID NO: 1113 - protein, 10 aa, Homo sapiens
KRCFPVIFGK

SEQ ID NO: 1114 - protein, 10 aa, Homo sapiens
ARYEFLWGPR

SEQ ID NO: 1115 - protein, 10 aa, Homo sapiens
ARVRIAYPSL

SEQ ID NO: 1116 - protein, 9 aa, Homo sapiens
YRAKELVTK

SEQ ID NO: 1117 - protein, 9 aa, Homo sapiens
ERVIKNYKR

SEQ ID NO: 1118 - protein, 9 aa, Homo sapiens
VRIAYPSLR

SEQ ID NO: 1119 - protein, 9 aa, Homo sapiens
LRKYRAKEL

SEQ ID NO: 1120 - protein, 9 aa, Homo sapiens
RCFPVIFGK

SEQ ID NO: 1121 - protein, 9 aa, Homo sapiens
PRALAETSY

SEQ ID NO: 1122 - protein, 9 aa, Homo sapiens
KMIFGIDVK

SEQ ID NO: 1123 - protein, 10 aa, Homo sapiens
YPSLREAALL

SEQ ID NO: 1124 - protein, 10 aa, Homo sapiens
GPRALAETSY

SEQ ID NO: 1125 - protein, 9 aa, Homo sapiens
DPASNTYTL

SEQ ID NO: 1126 - protein, 9 aa, Homo sapiens
YPSLREAAL

SEQ ID NO: 1127 - protein, 9 aa, Homo sapiens
VPGSNPARY

SEQ ID NO: 1128 - protein, 9 aa, Homo sapiens
FPKTGLLII

SEQ ID NO: 1129 - protein, 9 aa, Homo sapiens
LPTTISFTC

SEQ ID NO: 1130 - protein, 9 aa, Homo sapiens
KVDELAHFL

SEQ ID NO: 1131 - protein, 9 aa, Homo sapiens
MLERVIKNY

SEQ ID NO: 1132 - protein, 9 aa, Homo sapiens
LGLSYDGLL

SEQ ID NO: 1133 - protein, 10 aa, Homo sapiens
RVIKNYKRCF

SEQ ID NO: 1134 - protein, 10 aa, Homo sapiens
KASESLKMIF

SEQ ID NO: 1135 - protein, 10 aa, Homo sapiens
SSSPLVPGTL

SEQ ID NO: 1136 - protein, 9 aa, Homo sapiens
KAEMLERVI

SEQ ID NO: 1137 - protein, 9 aa, Homo sapiens
KTGLLIIVL

SEQ ID NO: 1138 - protein, 9 aa, Homo sapiens
KVDELAHFL

SEQ ID NO: 1139 - protein, 9 aa, Homo sapiens
KASESLKMI

SEQ ID NO: 1140 - protein, 9 aa, Homo sapiens
PSLREAALL

SEQ ID NO: 1141 - protein, 9 aa, Homo sapiens
SSPLVPGTL

SEQ ID NO: 1142 - protein, 9 aa, Homo sapiens
LAHFLLRKY

SEQ ID NO: 1143 - protein, 15 aa, Homo sapiens
PARYEFLWGPRALAE

SEQ ID NO: 1144 - protein, 15 aa, Homo sapiens
TGLLIIVLGTIAMEG

SEQ ID NO: 1145 - protein, 15 aa, Homo sapiens
YLEYRQVPGSNPARY

SEQ ID NO: 1146 - protein, 15 aa, Homo sapiens
KRCFPVIFGKASESL

SEQ ID NO: 1147 - protein, 15 aa, Homo sapiens
EEALGLVGAQAPTTE

SEQ ID NO: 1148 - protein, 15 aa, Homo sapiens
SESLKMIFGIDVKEV

SEQ ID NO: 1149 - protein, 15 aa, Homo sapiens
GLLIIVLGTIAMEGD

SEQ ID NO: 1150 - protein, 15 aa, Homo sapiens
PGTLEEVPAAESAGP

SEQ ID NO: 1151 - protein, 15 aa, Homo sapiens
HFLLRKYRAKELVTK

SEQ ID NO: 1152 - protein, 15 aa, Homo sapiens
EEIWEELGVMGVYDG

SEQ ID NO: 1153 - protein, 15 aa, Homo sapiens
GPSTSPDAESLFREA

SEQ ID NO: 1154 - protein, 15 aa, Homo sapiens
EHTVYGEPRKLLTQD

SEQ ID NO: 1155 - protein, 15 aa, Homo sapiens
LERVIKNYKRCFPVI

SEQ ID NO: 1156 - protein, 15 aa, Homo sapiens
VVRVNARVRIAYPSL

SEQ ID NO: 1157 - protein, 15 aa, Homo sapiens
KMIFGIDVKEVDPAS

SEQ ID NO: 1158 - protein, 15 aa, Homo sapiens
KAEMLERVIKNYKRC

SEQ ID NO: 1159 - protein, 15 aa, Homo sapiens
CLGLSYDGLLGNNQI

SEQ ID NO: 1160 - protein, 15 aa, Homo sapiens
RKLLTQDWVQENYLE

SEQ ID NO: 1161 - protein, 15 aa, Homo sapiens
ALSNKVDELAHFLLR

SEQ ID NO: 1162 - protein, 15 aa, Homo sapiens
TYTLVTCLGLSYDGL

SEQ ID NO: 1163 - protein, 15 aa, Homo sapiens
ESLFREALSNKVDEL

SEQ ID NO: 1164 - protein, 15 aa, Homo sapiens
SNKVDELAHFLLRKY

SEQ ID NO: 1165 - protein, 15 aa, Homo sapiens
VKEVDPASNTYTLVT

SEQ ID NO: 1166 - protein, 15 aa, Homo sapiens
GLLIIVLGTIAMEGD

SEQ ID NO: 1167 - protein, 15 aa, Homo sapiens
EHTVYGEPRKLLTQD

SEQ ID NO: 1168 - protein, 15 aa, Homo sapiens
VKVLEHVVRVNARVR

SEQ ID NO: 1169 - protein, 15 aa, Homo sapiens
KRCFPVIFGKASESL

SEQ ID NO: 1170 - protein, 15 aa, Homo sapiens
PVIFGKASESLKMIF

SEQ ID NO: 1171 - protein, 15 aa, Homo sapiens
SNTYTLVTCLGLSYD

SEQ ID NO: 1172 - protein, 15 aa, Homo sapiens
GLSYDGLLGNNQIFP

SEQ ID NO: 1173 - protein, 15 aa, Homo sapiens
ESLFREALSNKVDEL

SEQ ID NO: 1174 - protein, 15 aa, Homo sapiens
VTCLGLSYDGLLGNN

SEQ ID NO: 1175 - protein, 15 aa, Homo sapiens
NQIFPKTGLLIIVLG

SEQ ID NO: 1176 - protein, 15 aa, Homo sapiens
ASALPTTISFTCWRQ

SEQ ID NO: 1177 - protein, 15 aa, Homo sapiens
FPVIFGKASESLKMI

SEQ ID NO: 1178 - protein, 15 aa, Homo sapiens
GLLIIVLGTIAMEGD

SEQ ID NO: 1179 - protein, 15 aa, Homo sapiens
PRALAETSYVKVLEH

SEQ ID NO: 1180 - protein, 15 aa, Homo sapiens
ETSYVKVLEHVVRVN

SEQ ID NO: 1181 - protein, 15 aa, Homo sapiens
RIAYPSLREAALLEE

SEQ ID NO: 1182 - protein, 15 aa, Homo sapiens
EQEAAVSSSSPLVPG

SEQ ID NO: 1183 - protein, 15 aa, Homo sapiens
VKVLEHVVRVNARVR

SEQ ID NO: 1184 - protein, 15 aa, Homo sapiens
RYEFLWGPRALAETS

SEQ ID NO: 1185 - protein, 15 aa, Homo sapiens
PARYEFLWGPRALAE

SEQ ID NO: 1186 - protein, 15 aa, Homo sapiens
ELAHFLLRKYRAKEL

SEQ ID NO: 1187 - protein, 15 aa, Homo sapiens
KRCFPVIFGKASESL

SEQ ID NO: 1188 - protein, 15 aa, Homo sapiens
YLEYRQVPGSNPARY

SEQ ID NO: 1189 - protein, 15 aa, Homo sapiens
TSYVKVLEHVVRVNA

SEQ ID NO: 1190 - protein, 15 aa, Homo sapiens
SNKVDELAHFLLRKY

SEQ ID NO: 1191 - protein, 15 aa, Homo sapiens
KMIFGIDVKEVDPAS

SEQ ID NO: 1192 - protein, 15 aa, Homo sapiens
AEMLERVIKNYKRCF

SEQ ID NO: 1193 - protein, 15 aa, Homo sapiens
HFLLRKYRAKELVTK

SEQ ID NO: 1194 - protein, 15 aa, Homo sapiens
LGVMGVYDGREHTVY

SEQ ID NO: 1195 - protein, 15 aa, Homo sapiens
EAAVSSSSPLVPGTL

SEQ ID NO: 1196 - protein, 15 aa, Homo sapiens
ASALPTTISFTCWRQ

SEQ ID NO: 1197 - protein, 15 aa, Homo sapiens
ERVIKNYKRCFPVIF

SEQ ID NO: 1198 - protein, 15 aa, Homo sapiens
SESLKMIFGIDVKEV

SEQ ID NO: 1199 - protein, 15 aa, Homo sapiens
TCLGLSYDGLLGNNQ

SEQ ID NO: 1200 - protein, 15 aa, Homo sapiens
NNQIFPKTGLLIIVL

SEQ ID NO: 1201 - protein, 15 aa, Homo sapiens
GLLIIVLGTIAMEGD

SEQ ID NO: 1202 - protein, 15 aa, Homo sapiens
LIIVLGTIAMEGDSA

SEQ ID NO: 1203 - protein, 188 aa, Homo sapiens
MNGDDAFARRPTVGAQIPEKIQKAFDDIAKYFSKEEWEKMKASEKIFYVYMKRKYEAMTKLGFKATLPPFMCNKRAEDFQGNDLDNDPNRGNQVERPQMTFGRLQGISPKIMPKKPAEEGNDSEEVPEASGPQNDGKELCPPGKPTTSEKIHERSGPKRGEHAWTHRLRERKQLVIYEEISDPEEDDE

SEQ ID NO: 1204 - protein, 11 aa, Homo sapiens
RLRERKQLVIY

SEQ ID NO: 1205 - protein, 11 aa, Homo sapiens
EKMKASEKIFY

SEQ ID NO: 1206 - protein, 11 aa, Homo sapiens
KIFYVYMKRKY

SEQ ID NO: 1207 - protein, 11 aa, Homo sapiens
IQKAFDDIAKY

SEQ ID NO: 1208 - protein, 11 aa, Homo sapiens
MKASEKIFYVY

SEQ ID NO: 1209 - protein, 10 aa, Homo sapiens
LRERKQLVIY

SEQ ID NO: 1210 - protein, 10 aa, Homo sapiens
IFYVYMKRKY

SEQ ID NO: 1211 - protein, 9 aa, Homo sapiens
ASEKIFYVY

SEQ ID NO: 1212 - protein, 9 aa, Homo sapiens
KAFDDIAKY

SEQ ID NO: 1213 - protein, 9 aa, Homo sapiens
FYVYMKRKY

SEQ ID NO: 1214 - protein, 10 aa, Homo sapiens
RLRERKQLVI

SEQ ID NO: 1215 - protein, 10 aa, Homo sapiens
QMTFGRLQGI

SEQ ID NO: 1216 - protein, 9 aa, Homo sapiens
RLQGISPKI

SEQ ID NO: 1217 - protein, 9 aa, Homo sapiens
KASEKIFYV

SEQ ID NO: 1218 - protein, 9 aa, Homo sapiens
RLRERKQLV

SEQ ID NO: 1219 - protein, 9 aa, Homo sapiens
QIPEKIQKA

SEQ ID NO: 1220 - protein, 9 aa, Homo sapiens
MTFGRLQGI

SEQ ID NO: 1221 - protein, 9 aa, Homo sapiens
TKLGFKATL

SEQ ID NO: 1222 - protein, 9 aa, Homo sapiens
DAFARRPTV

SEQ ID NO: 1223 - protein, 9 aa, Homo sapiens
KIQKAFDDI

SEQ ID NO: 1224 - protein, 10 aa, Homo sapiens
RLRERKQLVI

SEQ ID NO: 1225 - protein, 10 aa, Homo sapiens
KIFYVYMKRK

SEQ ID NO: 1226 - protein, 9 aa, Homo sapiens
KIHERSGPK

SEQ ID NO: 1227 - protein, 9 aa, Homo sapiens
QVERPQMTF

SEQ ID NO: 1228 - protein, 9 aa, Homo sapiens
TLPPFMCNK

SEQ ID NO: 1229 - protein, 9 aa, Homo sapiens
GISPKIMPK

SEQ ID NO: 1230 - protein, 9 aa, Homo sapiens
TVGAQIPEK

SEQ ID NO: 1231 - protein, 9 aa, Homo sapiens
AQIPEKIQK

SEQ ID NO: 1232 - protein, 9 aa, Homo sapiens
KRKYEAMTK

SEQ ID NO: 1233 - protein, 10 aa, Homo sapiens
ARRPTVGAQI

SEQ ID NO: 1234 - protein, 10 aa, Homo sapiens
ATLPPFMCNK

SEQ ID NO: 1235 - protein, 10 aa, Homo sapiens
PTVGAQIPEK

SEQ ID NO: 1236 - protein, 10 aa, Homo sapiens
PTTSEKIHER

SEQ ID NO: 1237 - protein, 10 aa, Homo sapiens
FSKEEWEKMK

SEQ ID NO: 1238 - protein, 9 aa, Homo sapiens
ASGPQNDGK

SEQ ID NO: 1239 - protein, 9 aa, Homo sapiens
TVGAQIPEK

SEQ ID NO: 1240 - protein, 9 aa, Homo sapiens
GISPKIMPK

SEQ ID NO: 1241 - protein, 9 aa, Homo sapiens
TTSEKIHER

SEQ ID NO: 1242 - protein, 9 aa, Homo sapiens
WTHRLRERK

SEQ ID NO: 1243 - protein, 9 aa, Homo sapiens
AQIPEKIQK

SEQ ID NO: 1244 - protein, 10 aa, Homo sapiens
KYEAMTKLGF

SEQ ID NO: 1245 - protein, 10 aa, Homo sapiens
TVGAQIPEKI

SEQ ID NO: 1246 - protein, 10 aa, Homo sapiens
QIPEKIQKAF

SEQ ID NO: 1247 - protein, 10 aa, Homo sapiens
VYMKRKYEAM

SEQ ID NO: 1248 - protein, 10 aa, Homo sapiens
GRLQGISPKI

SEQ ID NO: 1249 - protein, 9 aa, Homo sapiens
AFDDIAKYF

SEQ ID NO: 1250 - protein, 9 aa, Homo sapiens
VGAQIPEKI

SEQ ID NO: 1251 - protein, 9 aa, Homo sapiens
GFKATLPPF

SEQ ID NO: 1252 - protein, 9 aa, Homo sapiens
GKPTTSEKI

SEQ ID NO: 1253 - protein, 9 aa, Homo sapiens
KQLVIYEEI

SEQ ID NO: 1254 - protein, 10 aa, Homo sapiens
EVPEASGPQN

SEQ ID NO: 1255 - protein, 10 aa, Homo sapiens
ERPQMTFGRL

SEQ ID NO: 1256 - protein, 10 aa, Homo sapiens
LVIYEEISDP

SEQ ID NO: 1257 - protein, 10 aa, Homo sapiens
EKMKASEKIF

SEQ ID NO: 1258 - protein, 10 aa, Homo sapiens
MTKLGFKATL

SEQ ID NO: 1259 - protein, 9 aa, Homo sapiens
KAFDDIAKY

SEQ ID NO: 1260 - protein, 9 aa, Homo sapiens
EKIFYVYMK

SEQ ID NO: 1261 - protein, 9 aa, Homo sapiens
QVERPQMTF

SEQ ID NO: 1262 - protein, 9 aa, Homo sapiens
EAMTKLGFK

SEQ ID NO: 1263 - protein, 9 aa, Homo sapiens
MTFGRLQGI

SEQ ID NO: 1264 - protein, 11 aa, Homo sapiens
ATLPPFMCNKR

SEQ ID NO: 1265 - protein, 11 aa, Homo sapiens
KIQKAFDDIAK

SEQ ID NO: 1266 - protein, 11 aa, Homo sapiens
QVERPQMTFGR

SEQ ID NO: 1267 - protein, 10 aa, Homo sapiens
GAQIPEKIQK

SEQ ID NO: 1268 - protein, 10 aa, Homo sapiens
DPNRGNQVER

SEQ ID NO: 1269 - protein, 10 aa, Homo sapiens
EASGPQNDGK

SEQ ID NO: 1270 - protein, 9 aa, Homo sapiens
TTSEKIHER

SEQ ID NO: 1271 - protein, 9 aa, Homo sapiens
EAMTKLGFK

SEQ ID NO: 1272 - protein, 9 aa, Homo sapiens
TVGAQIPEK

SEQ ID NO: 1273 - protein, 9 aa, Homo sapiens
GISPKIMPK

SEQ ID NO: 1274 - protein, 10 aa, Homo sapiens
SPKIMPKKPA

SEQ ID NO: 1275 - protein, 10 aa, Homo sapiens
GPKRGEHAWT

SEQ ID NO: 1276 - protein, 10 aa, Homo sapiens
LPPFMCNKRA

SEQ ID NO: 1277 - protein, 9 aa, Homo sapiens
RPQMTFGRL

SEQ ID NO: 1278 - protein, 9 aa, Homo sapiens
GPQNDGKEL

SEQ ID NO: 1279 - protein, 9 aa, Homo sapiens
IPEKIQKAF

SEQ ID NO: 1280 - protein, 9 aa, Homo sapiens
PPGKPTTSE

SEQ ID NO: 1281 - protein, 9 aa, Homo sapiens
FARRPTVGA

SEQ ID NO: 1282 - protein, 9 aa, Homo sapiens
AEDFQGNDL

SEQ ID NO: 1283 - protein, 9 aa, Homo sapiens
MPKKPAEEG

SEQ ID NO: 1284 - protein, 9 aa, Homo sapiens
WEKMKASEK

SEQ ID NO: 1285 - protein, 9 aa, Homo sapiens
YMKRKYEAM

SEQ ID NO: 1286 - protein, 9 aa, Homo sapiens
SPKIMPKKP

SEQ ID NO: 1287 - protein, 9 aa, Homo sapiens
GPQNDGKEL

SEQ ID NO: 1288 - protein, 8 aa, Homo sapiens
RLRERKQL

SEQ ID NO: 1289 - protein, 8 aa, Homo sapiens
KLGFKATL

SEQ ID NO: 1290 - protein, 8 aa, Homo sapiens
EAMTKLGF

SEQ ID NO: 1291 - protein, 8 aa, Homo sapiens
IQKAFDDI

SEQ ID NO: 1292 - protein, 8 aa, Homo sapiens
GPKRGEHA

SEQ ID NO: 1293 - protein, 9 aa, Homo sapiens
GFKATLPPF

SEQ ID NO: 1294 - protein, 10 aa, Homo sapiens
NQVERPQMTF

SEQ ID NO: 1295 - protein, 10 aa, Homo sapiens
AQIPEKIQKA

SEQ ID NO: 1296 - protein, 10 aa, Homo sapiens
KASEKIFYVY

SEQ ID NO: 1297 - protein, 10 aa, Homo sapiens
RLRERKQLVI

SEQ ID NO: 1298 - protein, 10 aa, Homo sapiens
RLQGISPKIM

SEQ ID NO: 1299 - protein, 10 aa, Homo sapiens
ELCPPGKPTT

SEQ ID NO: 1300 - protein, 9 aa, Homo sapiens
KAFDDIAKY

SEQ ID NO: 1301 - protein, 9 aa, Homo sapiens
AQIPEKIQK

SEQ ID NO: 1302 - protein, 9 aa, Homo sapiens
PQNDGKELC

SEQ ID NO: 1303 - protein, 9 aa, Homo sapiens
RLRERKQLV

SEQ ID NO: 1304 - protein, 9 aa, Homo sapiens
RERKQLVIY

SEQ ID NO: 1305 - protein, 9 aa, Homo sapiens
YEAMTKLGF

SEQ ID NO: 1306 - protein, 9 aa, Homo sapiens
AEDFQGNDL

SEQ ID NO: 1307 - protein, 9 aa, Homo sapiens
GEHAWTHRL

SEQ ID NO: 1308 - protein, 9 aa, Homo sapiens
EEISDPEED

SEQ ID NO: 1309 - protein, 8 aa, Homo sapiens
SEKIFYVY

SEQ ID NO: 1310 - protein, 8 aa, Homo sapiens
PEKIQKAF

SEQ ID NO: 1311 - protein, 8 aa, Homo sapiens
VERPQMTF

SEQ ID NO: 1312 - protein, 8 aa, Homo sapiens
EEWEKMKA

SEQ ID NO: 1313 - protein, 8 aa, Homo sapiens
EEVPEASG

SEQ ID NO: 1314 - protein, 10 aa, Homo sapiens
GRLQGISPKI

SEQ ID NO: 1315 - protein, 10 aa, Homo sapiens
KRKYEAMTKL

SEQ ID NO: 1316 - protein, 10 aa, Homo sapiens
KRGEHAWTHR

SEQ ID NO: 1317 - protein, 10 aa, Homo sapiens
ERPQMTFGRL

SEQ ID NO: 1318 - protein, 10 aa, Homo sapiens
ERSGPKRGEH

SEQ ID NO: 1319 - protein, 9 aa, Homo sapiens
GRLQGISPK

SEQ ID NO: 1320 - protein, 9 aa, Homo sapiens
KRKYEAMTK

SEQ ID NO: 1321 - protein, 9 aa, Homo sapiens
HRLRERKQL

SEQ ID NO: 1322 - protein, 9 aa, Homo sapiens
RRPTVGAQI

SEQ ID NO: 1323 - protein, 9 aa, Homo sapiens
LRERKQLVI

SEQ ID NO: 1324 - protein, 10 aa, Homo sapiens
THRLRERKQL

SEQ ID NO: 1325 - protein, 10 aa, Homo sapiens
KRKYEAMTKL

SEQ ID NO: 1326 - protein, 10 aa, Homo sapiens
ERPQMTFGRL

SEQ ID NO: 1327 - protein, 10 aa, Homo sapiens
GRLQGISPKI

SEQ ID NO: 1328 - protein, 10 aa, Homo sapiens
IHERSGPKRG

SEQ ID NO: 1329 - protein, 9 aa, Homo sapiens
LRERKQLVI

SEQ ID NO: 1330 - protein, 9 aa, Homo sapiens
RRPTVGAQI

SEQ ID NO: 1331 - protein, 9 aa, Homo sapiens
AFDDIAKYF

SEQ ID NO: 1332 - protein, 9 aa, Homo sapiens
TKLGFKATL

SEQ ID NO: 1333 - protein, 9 aa, Homo sapiens
AEDFQGNDL

SEQ ID NO: 1334 - protein, 10 aa, Homo sapiens
KAFDDIAKYF

SEQ ID NO: 1335 - protein, 10 aa, Homo sapiens
KASEKIFYVY

SEQ ID NO: 1336 - protein, 10 aa, Homo sapiens
RAEDFQGNDL

SEQ ID NO: 1337 - protein, 10 aa, Homo sapiens
MTKLGFKATL

SEQ ID NO: 1338 - protein, 10 aa, Homo sapiens
ASEKIFYVYM

SEQ ID NO: 1339 - protein, 10 aa, Homo sapiens
IAKYFSKEEW

SEQ ID NO: 1340 - protein, 9 aa, Homo sapiens
KAFDDIAKY

SEQ ID NO: 1341 - protein, 9 aa, Homo sapiens
FSKEEWEKM

SEQ ID NO: 1342 - protein, 9 aa, Homo sapiens
ASEKIFYVY

SEQ ID NO: 1343 - protein, 9 aa, Homo sapiens
QVERPQMTF

SEQ ID NO: 1344 - protein, 15 aa, Homo sapiens
QMTFGRLQGISPKIM

SEQ ID NO: 1345 - protein, 15 aa, Homo sapiens
RPTVGAQIPEKIQKA

SEQ ID NO: 1346 - protein, 15 aa, Homo sapiens
FGRLQGISPKIMPKK

SEQ ID NO: 1347 - protein, 15 aa, Homo sapiens
DDAFARRPTVGAQIP

SEQ ID NO: 1348 - protein, 15 aa, Homo sapiens
KEEWEKMKASEKIFY

SEQ ID NO: 1349 - protein, 15 aa, Homo sapiens
KRKYEAMTKLGFKAT

SEQ ID NO: 1350 - protein, 15 aa, Homo sapiens
KLGFKATLPPFMCNK

SEQ ID NO: 1351 - protein, 15 aa, Homo sapiens
QKAFDDIAKYFSKEE

SEQ ID NO: 1352 - protein, 15 aa, Homo sapiens
PPFMCNKRAEDFQGN

SEQ ID NO: 1353 - protein, 15 aa, Homo sapiens
QGISPKIMPKKPAEE

SEQ ID NO: 1354 - protein, 15 aa, Homo sapiens
GNDLDNDPNRGNQVE

SEQ ID NO: 1355 - protein, 15 aa, Homo sapiens
GAQIPEKIQKAFDDI

SEQ ID NO: 1356 - protein, 15 aa, Homo sapiens
WEKMKASEKIFYVYM

SEQ ID NO: 1357 - protein, 15 aa, Homo sapiens
EKIFYVYMKRKYEAM

SEQ ID NO: 1358 - protein, 15 aa, Homo sapiens
KIQKAFDDIAKYFSK

SEQ ID NO: 1359 - protein, 15 aa, Homo sapiens
THRLRERKQLVIYEE

SEQ ID NO: 1360 - protein, 15 aa, Homo sapiens
IQKAFDDIAKYFSKE

SEQ ID NO: 1361 - protein, 15 aa, Homo sapiens
YVYMKRKYEAMTKLG

SEQ ID NO: 1362 - protein, 15 aa, Homo sapiens
PPFMCNKRAEDFQGN

SEQ ID NO: 1363 - protein, 15 aa, Homo sapiens
CNKRAEDFQGNDLDN

SEQ ID NO: 1364 - protein, 15 aa, Homo sapiens
GNDLDNDPNRGNQVE

SEQ ID NO: 1365 - protein, 15 aa, Homo sapiens
QKAFDDIAKYFSKEE

SEQ ID NO: 1366 - protein, 15 aa, Homo sapiens
AKYFSKEEWEKMKAS

SEQ ID NO: 1367 - protein, 15 aa, Homo sapiens
PEKIQKAFDDIAKYF

SEQ ID NO: 1368 - protein, 15 aa, Homo sapiens
SEKIFYVYMKRKYEA

SEQ ID NO: 1369 - protein, 15 aa, Homo sapiens
YEAMTKLGFKATLPP

SEQ ID NO: 1370 - protein, 15 aa, Homo sapiens
FGRLQGISPKIMPKK

SEQ ID NO: 1371 - protein, 15 aa, Homo sapiens
SEEVPEASGPQNDGK

SEQ ID NO: 1372 - protein, 15 aa, Homo sapiens
QLVIYEEISDPEEDD

SEQ ID NO: 1373 - protein, 15 aa, Homo sapiens
MNGDDAFARRPTVGA

SEQ ID NO: 1374 - protein, 15 aa, Homo sapiens
KLGFKATLPPFMCNK

SEQ ID NO: 1375 - protein, 15 aa, Homo sapiens
PEKIQKAFDDIAKYF

SEQ ID NO: 1376 - protein, 15 aa, Homo sapiens
CPPGKPTTSEKIHER

SEQ ID NO: 1377 - protein, 15 aa, Homo sapiens
DDAFARRPTVGAQIP

SEQ ID NO: 1378 - protein, 15 aa, Homo sapiens
FGRLQGISPKIMPKK

SEQ ID NO: 1379 - protein, 15 aa, Homo sapiens
PKRGEHAWTHRLRER

SEQ ID NO: 1380 - protein, 15 aa, Homo sapiens
LVIYEEISDPEEDDE

SEQ ID NO: 1381 - protein, 15 aa, Homo sapiens
WEKMKASEKIFYVYM

SEQ ID NO: 1382 - protein, 15 aa, Homo sapiens
AKYFSKEEWEKMKAS

SEQ ID NO: 1383 - protein, 15 aa, Homo sapiens
EWEKMKASEKIFYVY

SEQ ID NO: 1384 - protein, 15 aa, Homo sapiens
QKAFDDIAKYFSKEE

SEQ ID NO: 1385 - protein, 15 aa, Homo sapiens
KIFYVYMKRKYEAMT

SEQ ID NO: 1386 - protein, 15 aa, Homo sapiens
KRKYEAMTKLGFKAT

SEQ ID NO: 1387 - protein, 15 aa, Homo sapiens
QMTFGRLQGISPKIM

SEQ ID NO: 1388 - protein, 15 aa, Homo sapiens
EHAWTHRLRERKQLV

SEQ ID NO: 1389 - protein, 15 aa, Homo sapiens
EKIFYVYMKRKYEAM

SEQ ID NO: 1390 - protein, 15 aa, Homo sapiens
IFYVYMKRKYEAMTK

SEQ ID NO: 1391 - protein, 15 aa, Homo sapiens
GISPKIMPKKPAEEG

SEQ ID NO: 1392 - protein, 15 aa, Homo sapiens
LPPFMCNKRAEDFQG

SEQ ID NO: 1393 - protein, 15 aa, Homo sapiens
DDAFARRPTVGAQIP

SEQ ID NO: 1394 - protein, 15 aa, Homo sapiens
RKQLVIYEEISDPEE

SEQ ID NO: 1395 - protein, 15 aa, Homo sapiens
FDDIAKYFSKEEWEK

SEQ ID NO: 1396 - protein, 15 aa, Homo sapiens
VYMKRKYEAMTKLGF

SEQ ID NO: 1397 - protein, 15 aa, Homo sapiens
MTKLGFKATLPPFMC

SEQ ID NO: 1398 - protein, 15 aa, Homo sapiens
KATLPPFMCNKRAED

SEQ ID NO: 1399 - protein, 15 aa, Homo sapiens
DDAFARRPTVGAQIP

SEQ ID NO: 1400 - protein, 15 aa, Homo sapiens
QMTFGRLQGISPKIM

SEQ ID NO: 1401 - protein, 15 aa, Homo sapiens
EKIQKAFDDIAKYFS

SEQ ID NO: 1402 - protein, 15 aa, Homo sapiens
YFSKEEWEKMKASEK

SEQ ID NO: 1403 - protein, 15 aa, Homo sapiens
ASEKIFYVYMKRKYE

SEQ ID NO: 1404 - protein, 256 aa, Homo sapiens
MAHRPPSPALASVLLALLLSGAARAAEIVGGHEAQPHSRPYMASLQMRGNPGSHFCGGTLIHPSFVLTAAHCLRDIPQRLVNVVLGAHNVRTQEPTQQHFSVAQVFLNNYDAENKLNDVLLIQLSSPANLSASVATVQLPQQDQPVPHGTQCLAMGWGRVGAHDPPAQVLQELNVTVVTFFCRPHNICTFVPRRKAGICFGDSGGPLICDGIIQGIDSFVIWGCATRLFPDFFTRVALYVDWIRSTLRRVEAKGRP

SEQ ID NO: 1405 - protein, 11 aa, Homo sapiens
FPDFFTRVALY

SEQ ID NO: 1406 - protein, 11 aa, Homo sapiens
GHEAQPHSRPY

SEQ ID NO: 1407 - protein, 11 aa, Homo sapiens
FSVAQVFLNNY

SEQ ID NO: 1408 - protein, 10 aa, Homo sapiens
SVAQVFLNNY

SEQ ID NO: 1409 - protein, 10 aa, Homo sapiens
HEAQPHSRPY

SEQ ID NO: 1410 - protein, 10 aa, Homo sapiens
LRDIPQRLVN

SEQ ID NO: 1411 - protein, 9 aa, Homo sapiens
DFFTRVALY

SEQ ID NO: 1412 - protein, 9 aa, Homo sapiens
EAQPHSRPY

SEQ ID NO: 1413 - protein, 9 aa, Homo sapiens
VAQVFLNNY

SEQ ID NO: 1414 - protein, 11 aa, Homo sapiens
YVDWIRSTLRR

SEQ ID NO: 1415 - protein, 10 aa, Homo sapiens
ALASVLLALL

SEQ ID NO: 1416 - protein, 10 aa, Homo sapiens
KLNDVLLIQL

SEQ ID NO: 1417 - protein, 10 aa, Homo sapiens
VLQELNVTVV

SEQ ID NO: 1418 - protein, 10 aa, Homo sapiens
LICDGIIQGI

SEQ ID NO: 1419 - protein, 10 aa, Homo sapiens
LIHPSFVLTA

SEQ ID NO: 1420 - protein, 10 aa, Homo sapiens
RLFPDFFTRV

SEQ ID NO: 1421 - protein, 10 aa, Homo sapiens
ALYVDWIRST

SEQ ID NO: 1422 - protein, 9 aa, Homo sapiens
NLSASVATV

SEQ ID NO: 1423 - protein, 9 aa, Homo sapiens
LLALLLSGA

SEQ ID NO: 1424 - protein, 9 aa, Homo sapiens
CLAMGWGRV

SEQ ID NO: 1425 - protein, 10 aa, Homo sapiens
FLNNYDAENK

SEQ ID NO: 1426 - protein, 10 aa, Homo sapiens
TLRRVEAKGR

SEQ ID NO: 1427 - protein, 10 aa, Homo sapiens
QVLQELNVTV

SEQ ID NO: 1428 - protein, 10 aa, Homo sapiens
IVGGHEAQPH

SEQ ID NO: 1429 - protein, 10 aa, Homo sapiens
RLVNVVLGAH

SEQ ID NO: 1430 - protein, 9 aa, Homo sapiens
ALLLSGAAR

SEQ ID NO: 1431 - protein, 9 aa, Homo sapiens
FVIWGCATR

SEQ ID NO: 1432 - protein, 9 aa, Homo sapiens
RLFPDFFTR

SEQ ID NO: 1433 - protein, 9 aa, Homo sapiens
VVLGAHNVR

SEQ ID NO: 1434 - protein, 9 aa, Homo sapiens
ELNVTVVTF

SEQ ID NO: 1435 - protein, 10 aa, Homo sapiens
FVLTAAHCLR

SEQ ID NO: 1436 - protein, 10 aa, Homo sapiens
NVTVVTFFCR

SEQ ID NO: 1437 - protein, 10 aa, Homo sapiens
YVDWIRSTLR

SEQ ID NO: 1438 - protein, 10 aa, Homo sapiens
RVALYVDWIR

SEQ ID NO: 1439 - protein, 9 aa, Homo sapiens
STLRRVEAK

SEQ ID NO: 1440 - protein, 9 aa, Homo sapiens
VVLGAHNVR

SEQ ID NO: 1441 - protein, 9 aa, Homo sapiens
ASVLLALLL

SEQ ID NO: 1442 - protein, 9 aa, Homo sapiens
SVLLALLLS

SEQ ID NO: 1443 - protein, 9 aa, Homo sapiens
VTVVTFFCR

SEQ ID NO: 1444 - protein, 9 aa, Homo sapiens
SVAQVFLNN

SEQ ID NO: 1445 - protein, 10 aa, Homo sapiens
LYVDWIRSTL

SEQ ID NO: 1446 - protein, 10 aa, Homo sapiens
CFGDSGGPLI

SEQ ID NO: 1447 - protein, 10 aa, Homo sapiens
TFVPRRKAGI

SEQ ID NO: 1448 - protein, 10 aa, Homo sapiens
SFVLTAAHCL

SEQ ID NO: 1449 - protein, 10 aa, Homo sapiens
PSPALASVLL

SEQ ID NO: 1450 - protein, 10 aa, Homo sapiens
VIWGCATRLF

SEQ ID NO: 1451 - protein, 9 aa, Homo sapiens
TFFCRPHNI

SEQ ID NO: 1452 - protein, 9 aa, Homo sapiens
CFGDSGGPL

SEQ ID NO: 1453 - protein, 9 aa, Homo sapiens
HFSVAQVFL

SEQ ID NO: 1454 - protein, 9 aa, Homo sapiens
NKLNDVLLI

SEQ ID NO: 1455 - protein, 10 aa, Homo sapiens
SVAQVFLNNY

SEQ ID NO: 1456 - protein, 10 aa, Homo sapiens
DGIIQGIDSF

SEQ ID NO: 1457 - protein, 10 aa, Homo sapiens
DVLLIQLSSP

SEQ ID NO: 1458 - protein, 10 aa, Homo sapiens
ELNVTVVTFF

SEQ ID NO: 1459 - protein, 10 aa, Homo sapiens
FVIWGCATRL

SEQ ID NO: 1460 - protein, 9 aa, Homo sapiens
DFFTRVALY

SEQ ID NO: 1461 - protein, 9 aa, Homo sapiens
ELNVTVVTF

SEQ ID NO: 1462 - protein, 9 aa, Homo sapiens
DVLLIQLSS

SEQ ID NO: 1463 - protein, 9 aa, Homo sapiens
YVDWIRSTL

SEQ ID NO: 1464 - protein, 9 aa, Homo sapiens
EAQPHSRPY

SEQ ID NO: 1465 - protein, 11 aa, Homo sapiens
DSFVIWGCATR

SEQ ID NO: 1466 - protein, 11 aa, Homo sapiens
LLALLLSGAAR

SEQ ID NO: 1467 - protein, 11 aa, Homo sapiens
GTQCLAMGWGR

SEQ ID NO: 1468 - protein, 11 aa, Homo sapiens
STLRRVEAKGR

SEQ ID NO: 1469 - protein, 10 aa, Homo sapiens
LALLLSGAAR

SEQ ID NO: 1470 - protein, 10 aa, Homo sapiens
YVDWIRSTLR

SEQ ID NO: 1471 - protein, 10 aa, Homo sapiens
NVVLGAHNVR

SEQ ID NO: 1472 - protein, 10 aa, Homo sapiens
NVTVVTFFCR

SEQ ID NO: 1473 - protein, 10 aa, Homo sapiens
RVALYVDWIR

SEQ ID NO: 1474 - protein, 11 aa, Homo sapiens
ATRLFPDFFTR

SEQ ID NO: 1475 - protein, 10 aa, Homo sapiens
FPDFFTRVAL

SEQ ID NO: 1476 - protein, 10 aa, Homo sapiens
PPSPALASVL

SEQ ID NO: 1477 - protein, 10 aa, Homo sapiens
IPQRLVNVVL

SEQ ID NO: 1478 - protein, 10 aa, Homo sapiens
QPVPHGTQCL

SEQ ID NO: 1479 - protein, 10 aa, Homo sapiens
VPHGTQCLAM

SEQ ID NO: 1480 - protein, 10 aa, Homo sapiens
DPPAQVLQEL

SEQ ID NO: 1481 - protein, 9 aa, Homo sapiens
SPALASVLL

SEQ ID NO: 1482 - protein, 9 aa, Homo sapiens
PPAQVLQEL

SEQ ID NO: 1483 - protein, 9 aa, Homo sapiens
AHRPPSPAL

SEQ ID NO: 1484 - protein, 9 aa, Homo sapiens
HPSFVLTAA

SEQ ID NO: 1485 - protein, 9 aa, Homo sapiens
ENKLNDVLL

SEQ ID NO: 1486 - protein, 9 aa, Homo sapiens
VPRRKAGIC

SEQ ID NO: 1487 - protein, 9 aa, Homo sapiens
CLRDIPQRL

SEQ ID NO: 1488 - protein, 9 aa, Homo sapiens
SPALASVLL

SEQ ID NO: 1489 - protein, 9 aa, Homo sapiens
PQRLVNVVL

SEQ ID NO: 1490 - protein, 9 aa, Homo sapiens
SASVATVQL

SEQ ID NO: 1491 - protein, 8 aa, Homo sapiens
VPRRKAGI

SEQ ID NO: 1492 - protein, 8 aa, Homo sapiens
ENKLNDVL

SEQ ID NO: 1493 - protein, 8 aa, Homo sapiens
VDWIRSTL

SEQ ID NO: 1494 - protein, 8 aa, Homo sapiens
DFFTRVAL

SEQ ID NO: 1495 - protein, 10 aa, Homo sapiens
QQHFSVAQVF

SEQ ID NO: 1496 - protein, 10 aa, Homo sapiens
SVAQVFLNNY

SEQ ID NO: 1497 - protein, 10 aa, Homo sapiens
ELNVTVVTFF

SEQ ID NO: 1498 - protein, 10 aa, Homo sapiens
RLFPDFFTRV

SEQ ID NO: 1499 - protein, 10 aa, Homo sapiens
RLVNVVLGAH

SEQ ID NO: 1500 - protein, 10 aa, Homo sapiens
KLNDVLLIQL

SEQ ID NO: 1501 - protein, 9 aa, Homo sapiens
ELNVTVVTF

SEQ ID NO: 1502 - protein, 9 aa, Homo sapiens
TQEPTQQHF

SEQ ID NO: 1503 - protein, 9 aa, Homo sapiens
GIIQGIDSF

SEQ ID NO: 1504 - protein, 9 aa, Homo sapiens
ALASVLLAL

SEQ ID NO: 1505 - protein, 9 aa, Homo sapiens
AENKLNDVL

SEQ ID NO: 1506 - protein, 9 aa, Homo sapiens
DFFTRVALY

SEQ ID NO: 1507 - protein, 9 aa, Homo sapiens
ATRLFPDFF

SEQ ID NO: 1508 - protein, 9 aa, Homo sapiens
GGTLIHPSF

SEQ ID NO: 1509 - protein, 8 aa, Homo sapiens
QEPTQQHF

SEQ ID NO: 1510 - protein, 8 aa, Homo sapiens
LNVTVVTF

SEQ ID NO: 1511 - protein, 8 aa, Homo sapiens
QELNVTVV

SEQ ID NO: 1512 - protein, 8 aa, Homo sapiens
NDVLLIQL

SEQ ID NO: 1513 - protein, 9 aa, Homo sapiens
PRRKAGICF

SEQ ID NO: 1514 - protein, 9 aa, Homo sapiens
CATRLFPDF

SEQ ID NO: 1515 - protein, 10 aa, Homo sapiens
TRLFPDFFTR

SEQ ID NO: 1516 - protein, 10 aa, Homo sapiens
SRPYMASLQM

SEQ ID NO: 1517 - protein, 10 aa, Homo sapiens
VRTQEPTQQH

SEQ ID NO: 1518 - protein, 10 aa, Homo sapiens
ARAAEIVGGH

SEQ ID NO: 1519 - protein, 9 aa, Homo sapiens
CRPHNICTF

SEQ ID NO: 1520 - protein, 9 aa, Homo sapiens
PRRKAGICF

SEQ ID NO: 1521 - protein, 9 aa, Homo sapiens
GIIQGIDSF

SEQ ID NO: 1522 - protein, 9 aa, Homo sapiens
MRGNPGSHF

SEQ ID NO: 1523 - protein, 9 aa, Homo sapiens
LRRVEAKGR

SEQ ID NO: 1524 - protein, 9 aa, Homo sapiens
RRVEAKGRP

SEQ ID NO: 1525 - protein, 10 aa, Homo sapiens
FPDFFTRVAL

SEQ ID NO: 1526 - protein, 10 aa, Homo sapiens
IPQRLVNVVL

SEQ ID NO: 1527 - protein, 10 aa, Homo sapiens
PPSPALASVL

SEQ ID NO: 1528 - protein, 10 aa, Homo sapiens
DPPAQVLQEL

SEQ ID NO: 1529 - protein, 10 aa, Homo sapiens
QPVPHGTQCL

SEQ ID NO: 1530 - protein, 10 aa, Homo sapiens
VPRRKAGICF

SEQ ID NO: 1531 - protein, 9 aa, Homo sapiens
SPALASVLL

SEQ ID NO: 1532 - protein, 9 aa, Homo sapiens
PPAQVLQEL

SEQ ID NO: 1533 - protein, 9 aa, Homo sapiens
GPLICDGII

SEQ ID NO: 1534 - protein, 9 aa, Homo sapiens
RPYMASLQM

SEQ ID NO: 1535 - protein, 10 aa, Homo sapiens
RTQEPTQQHF

SEQ ID NO: 1536 - protein, 10 aa, Homo sapiens
LTAAHCLRDI

SEQ ID NO: 1537 - protein, 10 aa, Homo sapiens
PSPALASVLL

SEQ ID NO: 1538 - protein, 10 aa, Homo sapiens
LSGAARAAEI

SEQ ID NO: 1539 - protein, 10 aa, Homo sapiens
GSHFCGGTLI

SEQ ID NO: 1540 - protein, 9 aa, Homo sapiens
ASVLLALLL

SEQ ID NO: 1541 - protein, 9 aa, Homo sapiens
EAQPHSRPY

SEQ ID NO: 1542 - protein, 9 aa, Homo sapiens
HSRPYMASL

SEQ ID NO: 1543 - protein, 9 aa, Homo sapiens
RVALYVDWI

SEQ ID NO: 1544 - protein, 9 aa, Homo sapiens
CATRLFPDF

SEQ ID NO: 1545 - protein, 15 aa, Homo sapiens
AMGWGRVGAHDPPAQ

SEQ ID NO: 1546 - protein, 15 aa, Homo sapiens
SVLLALLLSGAARAA

SEQ ID NO: 1547 - protein, 15 aa, Homo sapiens
NDVLLIQLSSPANLS

SEQ ID NO: 1548 - protein, 15 aa, Homo sapiens
HPSFVLTAAHCLRDI

SEQ ID NO: 1549 - protein, 15 aa, Homo sapiens
DGIIQGIDSFVIWGC

SEQ ID NO: 1550 - protein, 15 aa, Homo sapiens
GICFGDSGGPLICDG

SEQ ID NO: 1551 - protein, 15 aa, Homo sapiens
ASVLLALLLSGAARA

SEQ ID NO: 1552 - protein, 15 aa, Homo sapiens
LLALLLSGAARAAEI

SEQ ID NO: 1553 - protein, 15 aa, Homo sapiens
ARAAEIVGGHEAQPH

SEQ ID NO: 1554 - protein, 15 aa, Homo sapiens
SLQMRGNPGSHFCGG

SEQ ID NO: 1555 - protein, 15 aa, Homo sapiens
VFLNNYDAENKLNDV

SEQ ID NO: 1556 - protein, 15 aa, Homo sapiens
SPALASVLLALLLSG

SEQ ID NO: 1557 - protein, 15 aa, Homo sapiens
VLLIQLSSPANLSAS

SEQ ID NO: 1558 - protein, 15 aa, Homo sapiens
GGPLICDGIIQGIDS

SEQ ID NO: 1559 - protein, 15 aa, Homo sapiens
AAHCLRDIPQRLVNV

SEQ ID NO: 1560 - protein, 15 aa, Homo sapiens
ATRLFPDFFTRVALY

SEQ ID NO: 1561 - protein, 15 aa, Homo sapiens
SLQMRGNPGSHFCGG

SEQ ID NO: 1562 - protein, 15 aa, Homo sapiens
HFSVAQVFLNNYDAE

SEQ ID NO: 1563 - protein, 15 aa, Homo sapiens
PAQVLQELNVTVVTF

SEQ ID NO: 1564 - protein, 15 aa, Homo sapiens
RVALYVDWIRSTLRR

SEQ ID NO: 1565 - protein, 15 aa, Homo sapiens
TRLFPDFFTRVALYV

SEQ ID NO: 1566 - protein, 15 aa, Homo sapiens
SVLLALLLSGAARAA

SEQ ID NO: 1567 - protein, 15 aa, Homo sapiens
AHCLRDIPQRLVNVV

SEQ ID NO: 1568 - protein, 15 aa, Homo sapiens
VNVVLGAHNVRTQEP

SEQ ID NO: 1569 - protein, 15 aa, Homo sapiens
DVLLIQLSSPANLSA

SEQ ID NO: 1570 - protein, 15 aa, Homo sapiens
PAQVLQELNVTVVTF

SEQ ID NO: 1571 - protein, 15 aa, Homo sapiens
VTVVTFFCRPHNICT

SEQ ID NO: 1572 - protein, 15 aa, Homo sapiens
DGIIQGIDSFVIWGC

SEQ ID NO: 1573 - protein, 15 aa, Homo sapiens
QQHFSVAQVFLNNYD

SEQ ID NO: 1574 - protein, 15 aa, Homo sapiens
VTFFCRPHNICTFVP

SEQ ID NO: 1575 - protein, 15 aa, Homo sapiens
DGIIQGIDSFVIWGC

SEQ ID NO: 1576 - protein, 15 aa, Homo sapiens
HPSFVLTAAHCLRDI

SEQ ID NO: 1577 - protein, 15 aa, Homo sapiens
GICFGDSGGPLICDG

SEQ ID NO: 1578 - protein, 15 aa, Homo sapiens
YVDWIRSTLRRVEAK

SEQ ID NO: 1579 - protein, 15 aa, Homo sapiens
AHCLRDIPQRLVNVV

SEQ ID NO: 1580 - protein, 15 aa, Homo sapiens
VLLIQLSSPANLSAS

SEQ ID NO: 1581 - protein, 15 aa, Homo sapiens
PAQVLQELNVTVVTF

SEQ ID NO: 1582 - protein, 15 aa, Homo sapiens
LQELNVTVVTFFCRP

SEQ ID NO: 1583 - protein, 15 aa, Homo sapiens
CDGIIQGIDSFVIWG

SEQ ID NO: 1584 - protein, 15 aa, Homo sapiens
SFVIWGCATRLFPDF

SEQ ID NO: 1585 - protein, 15 aa, Homo sapiens
HNICTFVPRRKAGIC

SEQ ID NO: 1586 - protein, 15 aa, Homo sapiens
FVIWGCATRLFPDFF

SEQ ID NO: 1587 - protein, 15 aa, Homo sapiens
AMGWGRVGAHDPPAQ

SEQ ID NO: 1588 - protein, 15 aa, Homo sapiens
VVTFFCRPHNICTFV

SEQ ID NO: 1589 - protein, 15 aa, Homo sapiens
DWIRSTLRRVEAKGR

SEQ ID NO: 1590 - protein, 15 aa, Homo sapiens
PDFFTRVALYVDWIR

SEQ ID NO: 1591 - protein, 15 aa, Homo sapiens
ASVLLALLLSGAARA

SEQ ID NO: 1592 - protein, 15 aa, Homo sapiens
SVLLALLLSGAARAA

SEQ ID NO: 1593 - protein, 15 aa, Homo sapiens
SRPYMASLQMRGNPG

SEQ ID NO: 1594 - protein, 15 aa, Homo sapiens
LNNYDAENKLNDVLL

SEQ ID NO: 1595 - protein, 15 aa, Homo sapiens
QVFLNNYDAENKLND

SEQ ID NO: 1596 - protein, 15 aa, Homo sapiens
PHNICTFVPRRKAGI

SEQ ID NO: 1597 - protein, 15 aa, Homo sapiens
TRLFPDFFTRVALYV

SEQ ID NO: 1598 - protein, 15 aa, Homo sapiens
VNVVLGAHNVRTQEP

SEQ ID NO: 1599 - protein, 15 aa, Homo sapiens
LIQLSSPANLSASVA

SEQ ID NO: 1600 - protein, 15 aa, Homo sapiens
PAQVLQELNVTVVTF

SEQ ID NO: 1601 - protein, 15 aa, Homo sapiens
NVTVVTFFCRPHNIC

SEQ ID NO: 1602 - protein, 15 aa, Homo sapiens
VTVVTFFCRPHNICT

SEQ ID NO: 1603 - protein, 15 aa, Homo sapiens
DGIIQGIDSFVIWGC

SEQ ID NO: 1604 - protein, 15 aa, Homo sapiens
IQGIDSFVIWGCATR

SEQ ID NO: 1605 - protein, 465 aa, Homo sapiens
METGFPAIMYPGSFIGGWGEEYLSWEGPGLPDFVFQQQPVESEAMHCSNPKSGVVLATVARGPDACQILTRAPLGQDPPQRTVLGLLTANGQYRRTCGQGITRIRCYSGSENAFPPAGKKALPDCGVQEPPKQGFDIYMDELEQGDRDSCSVREGMAFEDVYEVDTGTLKSDLHFLLDFNTVSPMLVDSSLLSQSEDISSLGTDVINVTEYAEEIYQYLREAEIRHRPKAHYMKKQPDITEGMRTILVDWLVEVGEEYKLRAETLYLAVNFLDRFLSCMSVLRGKLQLVGTAAMLLASKYEEIYPPEVDEFVYITDDTYTKRQLLKMEHLLLKVLAFDLTVPTTNQFLLQYLRRQGVCVRTENLAKYVAELSLLEADPFLKYLPSLIAAAAFCLANYTVNKHFWPETLAAFTGYSLSEIVPCLSELHKAYLDIPHRPQQAIREKYKASKYLCVSLMEPPAVLLLQ

SEQ ID NO: 1606 - protein, 11 aa, Homo sapiens
VTEYAEEIYQY

SEQ ID NO: 1607 - protein, 11 aa, Homo sapiens
VREGMAFEDVY

SEQ ID NO: 1608 - protein, 11 aa, Homo sapiens
WPETLAAFTGY

SEQ ID NO: 1609 - protein, 11 aa, Homo sapiens
GTAAMLLASKY

SEQ ID NO: 1610 - protein, 10 aa, Homo sapiens
GTDVINVTEY

SEQ ID NO: 1611 - protein, 10 aa, Homo sapiens
LLEADPFLKY

SEQ ID NO: 1612 - protein, 10 aa, Homo sapiens
PTTNQFLLQY

SEQ ID NO: 1613 - protein, 10 aa, Homo sapiens
IREKYKASKY

SEQ ID NO: 1614 - protein, 9 aa, Homo sapiens
TTNQFLLQY

SEQ ID NO: 1615 - protein, 9 aa, Homo sapiens
PPEVDEFVY

SEQ ID NO: 1616 - protein, 9 aa, Homo sapiens
AAMLLASKY

SEQ ID NO: 1617 - protein, 10 aa, Homo sapiens
TILVDWLVEV

SEQ ID NO: 1618 - protein, 10 aa, Homo sapiens
GMAFEDVYEV

SEQ ID NO: 1619 - protein, 10 aa, Homo sapiens
SLMEPPAVLL

SEQ ID NO: 1620 - protein, 9 aa, Homo sapiens
NLAKYVAEL

SEQ ID NO: 1621 - protein, 9 aa, Homo sapiens
SLSEIVPCL

SEQ ID NO: 1622 - protein, 9 aa, Homo sapiens
VLRGKLQLV

SEQ ID NO: 1623 - protein, 9 aa, Homo sapiens
SLLEADPFL

SEQ ID NO: 1624 - protein, 9 aa, Homo sapiens
SLGTDVINV

SEQ ID NO: 1625 - protein, 9 aa, Homo sapiens
TLYLAVNFL

SEQ ID NO: 1626 - protein, 9 aa, Homo sapiens
KMEHLLLKV

SEQ ID NO: 1627 - protein, 10 aa, Homo sapiens
AIREKYKASK

SEQ ID NO: 1628 - protein, 10 aa, Homo sapiens
SLLEADPFLK

SEQ ID NO: 1629 - protein, 10 aa, Homo sapiens
IVPCLSELHK

SEQ ID NO: 1630 - protein, 10 aa, Homo sapiens
LLKMEHLLLK

SEQ ID NO: 1631 - protein, 10 aa, Homo sapiens
YLRRQGVCVR

SEQ ID NO: 1632 - protein, 9 aa, Homo sapiens
CVRTENLAK

SEQ ID NO: 1633 - protein, 9 aa, Homo sapiens
CLANYTVNK

SEQ ID NO: 1634 - protein, 9 aa, Homo sapiens
FVYITDDTY

SEQ ID NO: 1635 - protein, 9 aa, Homo sapiens
ALPDCGVQE

SEQ ID NO: 1636 - protein, 9 aa, Homo sapiens
FIGGWGEEY

SEQ ID NO: 1637 - protein, 9 aa, Homo sapiens
SVLRGKLQL

SEQ ID NO: 1638 - protein, 10 aa, Homo sapiens
DTYTKRQLLK

SEQ ID NO: 1639 - protein, 10 aa, Homo sapiens
GTAAMLLASK

SEQ ID NO: 1640 - protein, 10 aa, Homo sapiens
IVPCLSELHK

SEQ ID NO: 1641 - protein, 10 aa, Homo sapiens
SLLEADPFLK

SEQ ID NO: 1642 - protein, 10 aa, Homo sapiens
LLKMEHLLLK

SEQ ID NO: 1643 - protein, 9 aa, Homo sapiens
GVVLATVAR

SEQ ID NO: 1644 - protein, 9 aa, Homo sapiens
CVRTENLAK

SEQ ID NO: 1645 - protein, 9 aa, Homo sapiens
RTCGQGITR

SEQ ID NO: 1646 - protein, 9 aa, Homo sapiens
LVEVGEEYK

SEQ ID NO: 1647 - protein, 9 aa, Homo sapiens
YLAVNFLDR

SEQ ID NO: 1648 - protein, 10 aa, Homo sapiens
EYLSWEGPGL

SEQ ID NO: 1649 - protein, 10 aa, Homo sapiens
EYAEEIYQYL

SEQ ID NO: 1650 - protein, 10 aa, Homo sapiens
PFLKYLPSLI

SEQ ID NO: 1651 - protein, 10 aa, Homo sapiens
IYQYLREAEI

SEQ ID NO: 1652 - protein, 9 aa, Homo sapiens
IYPPEVDEF

SEQ ID NO: 1653 - protein, 9 aa, Homo sapiens
KYVAELSLL

SEQ ID NO: 1654 - protein, 9 aa, Homo sapiens
VYEVDTGTL

SEQ ID NO: 1655 - protein, 9 aa, Homo sapiens
HYMKKQPDI

SEQ ID NO: 1656 - protein, 9 aa, Homo sapiens
EYKLRAETL

SEQ ID NO: 1657 - protein, 9 aa, Homo sapiens
CYSGSENAF

SEQ ID NO: 1658 - protein, 10 aa, Homo sapiens
DVYEVDTGTL

SEQ ID NO: 1659 - protein, 10 aa, Homo sapiens
ETLYLAVNFL

SEQ ID NO: 1660 - protein, 10 aa, Homo sapiens
EIYPPEVDEF

SEQ ID NO: 1661 - protein, 10 aa, Homo sapiens
DPFLKYLPSL

SEQ ID NO: 1662 - protein, 9 aa, Homo sapiens
EIVPCLSEL

SEQ ID NO: 1663 - protein, 9 aa, Homo sapiens
ETGFPAIMY

SEQ ID NO: 1664 - protein, 9 aa, Homo sapiens
ETLAAFTGY

SEQ ID NO: 1665 - protein, 9 aa, Homo sapiens
EYAEEIYQY

SEQ ID NO: 1666 - protein, 9 aa, Homo sapiens
DTGTLKSDL

SEQ ID NO: 1667 - protein, 9 aa, Homo sapiens
EVDEFVYIT

SEQ ID NO: 1668 - protein, 11 aa, Homo sapiens
DVYEVDTGTLK

SEQ ID NO: 1669 - protein, 11 aa, Homo sapiens
DIPHRPQQAIR

SEQ ID NO: 1670 - protein, 10 aa, Homo sapiens
DTYTKRQLLK

SEQ ID NO: 1671 - protein, 9 aa, Homo sapiens
TAAMLLASK

SEQ ID NO: 1672 - protein, 9 aa, Homo sapiens
ITDDTYTKR

SEQ ID NO: 1673 - protein, 9 aa, Homo sapiens
GVVLATVAR

SEQ ID NO: 1674 - protein, 9 aa, Homo sapiens
EVGEEYKLR

SEQ ID NO: 1675 - protein, 9 aa, Homo sapiens
RTCGQGITR

SEQ ID NO: 1676 - protein, 9 aa, Homo sapiens
DACQILTRA

SEQ ID NO: 1677 - protein, 9 aa, Homo sapiens
KAYLDIPHR

SEQ ID NO: 1678 - protein, 10 aa, Homo sapiens
DPPQRTVLGL

SEQ ID NO: 1679 - protein, 10 aa, Homo sapiens
SPMLVDSSLL

SEQ ID NO: 1680 - protein, 10 aa, Homo sapiens
DPFLKYLPSL

SEQ ID NO: 1681 - protein, 10 aa, Homo sapiens
NPKSGVVLAT

SEQ ID NO: 1682 - protein, 10 aa, Homo sapiens
LPSLIAAAAF

SEQ ID NO: 1683 - protein, 9 aa, Homo sapiens
PPQRTVLGL

SEQ ID NO: 1684 - protein, 9 aa, Homo sapiens
FPPAGKKAL

SEQ ID NO: 1685 - protein, 9 aa, Homo sapiens
GPGLPDFVF

SEQ ID NO: 1686 - protein, 9 aa, Homo sapiens
IPHRPQQAI

SEQ ID NO: 1687 - protein, 9 aa, Homo sapiens
VPTTNQFLL

SEQ ID NO: 1688 - protein, 9 aa, Homo sapiens
EYKLRAETL

SEQ ID NO: 1689 - protein, 9 aa, Homo sapiens
LLKVLAFDL

SEQ ID NO: 1690 - protein, 9 aa, Homo sapiens
TLKSDLHFL

SEQ ID NO: 1691 - protein, 9 aa, Homo sapiens
LLKMEHLLL

SEQ ID NO: 1692 - protein, 9 aa, Homo sapiens
HLLLKVLAF

SEQ ID NO: 1693 - protein, 8 aa, Homo sapiens
VLRGKLQL

SEQ ID NO: 1694 - protein, 8 aa, Homo sapiens
FLKYLPSL

SEQ ID NO: 1695 - protein, 8 aa, Homo sapiens
NPKSGVVL

SEQ ID NO: 1696 - protein, 8 aa, Homo sapiens
PPAGKKAL

SEQ ID NO: 1697 - protein, 8 aa, Homo sapiens
LAKYVAEL

SEQ ID NO: 1698 - protein, 10 aa, Homo sapiens
CVRTENLAKY

SEQ ID NO: 1699 - protein, 10 aa, Homo sapiens
GQGITRIRCY

SEQ ID NO: 1700 - protein, 10 aa, Homo sapiens
LLASKYEEIY

SEQ ID NO: 1701 - protein, 10 aa, Homo sapiens
LLEADPFLKY

SEQ ID NO: 1702 - protein, 9 aa, Homo sapiens
WLVEVGEEY

SEQ ID NO: 1703 - protein, 9 aa, Homo sapiens
PQQAIREKY

SEQ ID NO: 1704 - protein, 9 aa, Homo sapiens
CLSELHKAY

SEQ ID NO: 1705 - protein, 9 aa, Homo sapiens
GLLTANGQY

SEQ ID NO: 1706 - protein, 9 aa, Homo sapiens
HLLLKVLAF

SEQ ID NO: 1707 - protein, 9 aa, Homo sapiens
VQEPPKQGF

SEQ ID NO: 1708 - protein, 9 aa, Homo sapiens
MEHLLLKVL

SEQ ID NO: 1709 - protein, 9 aa, Homo sapiens
WEGPGLPDF

SEQ ID NO: 1710 - protein, 9 aa, Homo sapiens
LEADPFLKY

SEQ ID NO: 1711 - protein, 9 aa, Homo sapiens
REKYKASKY

SEQ ID NO: 1712 - protein, 8 aa, Homo sapiens
PEVDEFVY

SEQ ID NO: 1713 - protein, 8 aa, Homo sapiens
YEVDTGTL

SEQ ID NO: 1714 - protein, 8 aa, Homo sapiens
QEPPKQGF

SEQ ID NO: 1715 - protein, 8 aa, Homo sapiens
TEYAEEIY

SEQ ID NO: 1716 - protein, 8 aa, Homo sapiens
AEEIYQYL

SEQ ID NO: 1717 - protein, 8 aa, Homo sapiens
TEGMRTIL

SEQ ID NO: 1718 - protein, 10 aa, Homo sapiens
RRTCGQGITR

SEQ ID NO: 1719 - protein, 10 aa, Homo sapiens
DRFLSCMSVL

SEQ ID NO: 1720 - protein, 10 aa, Homo sapiens
HRPQQAIREK

SEQ ID NO: 1721 - protein, 10 aa, Homo sapiens
HRPKAHYMKK

SEQ ID NO: 1722 - protein, 10 aa, Homo sapiens
IREKYKASKY

SEQ ID NO: 1723 - protein, 10 aa, Homo sapiens
KRQLLKMEHL

SEQ ID NO: 1724 - protein, 9 aa, Homo sapiens
LRRQGVCVR

SEQ ID NO: 1725 - protein, 9 aa, Homo sapiens
IREKYKASK

SEQ ID NO: 1726 - protein, 9 aa, Homo sapiens
KRQLLKMEH

SEQ ID NO: 1727 - protein, 9 aa, Homo sapiens
LREAEIRHR

SEQ ID NO: 1728 - protein, 10 aa, Homo sapiens
PPQRTVLGLL

SEQ ID NO: 1729 - protein, 10 aa, Homo sapiens
EPPKQGFDIY

SEQ ID NO: 1730 - protein, 10 aa, Homo sapiens
SPMLVDSSLL

SEQ ID NO: 1731 - protein, 10 aa, Homo sapiens
DPFLKYLPSL

SEQ ID NO: 1732 - protein, 10 aa, Homo sapiens
LPSLIAAAAF

SEQ ID NO: 1733 - protein, 9 aa, Homo sapiens
FPPAGKKAL

SEQ ID NO: 1734 - protein, 10 aa, Homo sapiens
DPPQRTVLGL

SEQ ID NO: 1735 - protein, 10 aa, Homo sapiens
RPQQAIREKY

SEQ ID NO: 1736 - protein, 10 aa, Homo sapiens
FPAIMYPGSF

SEQ ID NO: 1737 - protein, 10 aa, Homo sapiens
KSDLHFLLDF

SEQ ID NO: 1738 - protein, 10 aa, Homo sapiens
KASKYLCVSL

SEQ ID NO: 1739 - protein, 10 aa, Homo sapiens
RTCGQGITRI

SEQ ID NO: 1740 - protein, 10 aa, Homo sapiens
LAVNFLDRFL

SEQ ID NO: 1741 - protein, 10 aa, Homo sapiens
YSLSEIVPCL

SEQ ID NO: 1742 - protein, 10 aa, Homo sapiens
CSNPKSGVVL

SEQ ID NO: 1743 - protein, 10 aa, Homo sapiens
SSLLSQSEDI

SEQ ID NO: 1744 - protein, 10 aa, Homo sapiens
VSLMEPPAVL

SEQ ID NO: 1745 - protein, 9 aa, Homo sapiens
LSLLEADPF

SEQ ID NO: 1746 - protein, 9 aa, Homo sapiens
PSLIAAAAF

SEQ ID NO: 1747 - protein, 15 aa, Homo sapiens
VAELSLLEADPFLKY

SEQ ID NO: 1748 - protein, 15 aa, Homo sapiens
EHLLLKVLAFDLTVP

SEQ ID NO: 1749 - protein, 15 aa, Homo sapiens
LKYLPSLIAAAAFCL

SEQ ID NO: 1750 - protein, 15 aa, Homo sapiens
LLDFNTVSPMLVDSS

SEQ ID NO: 1751 - protein, 15 aa, Homo sapiens
SEDISSLGTDVINVT

SEQ ID NO: 1752 - protein, 15 aa, Homo sapiens
DPFLKYLPSLIAAAA

SEQ ID NO: 1753 - protein, 15 aa, Homo sapiens
NGQYRRTCGQGITRI

SEQ ID NO: 1754 - protein, 15 aa, Homo sapiens
RGKLQLVGTAAMLLA

SEQ ID NO: 1755 - protein, 15 aa, Homo sapiens
ASKYEEIYPPEVDEF

SEQ ID NO: 1756 - protein, 15 aa, Homo sapiens
YLCVSLMEPPAVLLL

SEQ ID NO: 1757 - protein, 15 aa, Homo sapiens
TGTLKSDLHFLLDFN

SEQ ID NO: 1758 - protein, 15 aa, Homo sapiens
LSLLEADPFLKYLPS

SEQ ID NO: 1759 - protein, 15 aa, Homo sapiens
DCGVQEPPKQGFDIY

SEQ ID NO: 1760 - protein, 15 aa, Homo sapiens
DLHFLLDFNTVSPML

SEQ ID NO: 1761 - protein, 15 aa, Homo sapiens
EAEIRHRPKAHYMKK

SEQ ID NO: 1762 - protein, 15 aa, Homo sapiens
VINVTEYAEEIYQYL

SEQ ID NO: 1763 - protein, 15 aa, Homo sapiens
QPDITEGMRTILVDW

SEQ ID NO: 1764 - protein, 15 aa, Homo sapiens
DWLVEVGEEYKLRAE

SEQ ID NO: 1765 - protein, 15 aa, Homo sapiens
VPCLSELHKAYLDIP

SEQ ID NO: 1766 - protein, 15 aa, Homo sapiens
GSFIGGWGEEYLSWE

SEQ ID NO: 1767 - protein, 15 aa, Homo sapiens
DLHFLLDFNTVSPML

SEQ ID NO: 1768 - protein, 15 aa, Homo sapiens
EFVYITDDTYTKRQL

SEQ ID NO: 1769 - protein, 15 aa, Homo sapiens
HKAYLDIPHRPQQAI

SEQ ID NO: 1770 - protein, 15 aa, Homo sapiens
FEDVYEVDTGTLKSD

SEQ ID NO: 1771 - protein, 15 aa, Homo sapiens
TGTLKSDLHFLLDFN

SEQ ID NO: 1772 - protein, 15 aa, Homo sapiens
VSPMLVDSSLLSQSE

SEQ ID NO: 1773 - protein, 15 aa, Homo sapiens
SEDISSLGTDVINVT

SEQ ID NO: 1774 - protein, 15 aa, Homo sapiens
YLAVNFLDRFLSCMS

SEQ ID NO: 1775 - protein, 15 aa, Homo sapiens
VNFLDRFLSCMSVLR

SEQ ID NO: 1776 - protein, 15 aa, Homo sapiens
RGKLQLVGTAAMLLA

SEQ ID NO: 1777 - protein, 15 aa, Homo sapiens
VDEFVYITDDTYTKR

SEQ ID NO: 1778 - protein, 15 aa, Homo sapiens
NGQYRRTCGQGITRI

SEQ ID NO: 1779 - protein, 15 aa, Homo sapiens
ENAFPPAGKKALPDC

SEQ ID NO: 1780 - protein, 15 aa, Homo sapiens
FEDVYEVDTGTLKSD

SEQ ID NO: 1781 - protein, 15 aa, Homo sapiens
FLLDFNTVSPMLVDS

SEQ ID NO: 1782 - protein, 15 aa, Homo sapiens
SEDISSLGTDVINVT

SEQ ID NO: 1783 - protein, 15 aa, Homo sapiens
EEIYQYLREAEIRHR

SEQ ID NO: 1784 - protein, 15 aa, Homo sapiens
RGKLQLVGTAAMLLA

SEQ ID NO: 1785 - protein, 15 aa, Homo sapiens
KLQLVGTAAMLLASK

SEQ ID NO: 1786 - protein, 15 aa, Homo sapiens
ASKYEEIYPPEVDEF

SEQ ID NO: 1787 - protein, 15 aa, Homo sapiens
YLAVNFLDRFLSCMS

SEQ ID NO: 1788 - protein, 15 aa, Homo sapiens
LANYTVNKHFWPETL

SEQ ID NO: 1789 - protein, 15 aa, Homo sapiens
HKAYLDIPHRPQQAI

SEQ ID NO: 1790 - protein, 15 aa, Homo sapiens
ETGFPAIMYPGSFIG

SEQ ID NO: 1791 - protein, 15 aa, Homo sapiens
LVEVGEEYKLRAETL

SEQ ID NO: 1792 - protein, 15 aa, Homo sapiens
ASKYLCVSLMEPPAV

SEQ ID NO: 1793 - protein, 15 aa, Homo sapiens
KRQLLKMEHLLLKVL

SEQ ID NO: 1794 - protein, 15 aa, Homo sapiens
LKMEHLLLKVLAFDL

SEQ ID NO: 1795 - protein, 15 aa, Homo sapiens
NQFLLQYLRRQGVCV

SEQ ID NO: 1796 - protein, 15 aa, Homo sapiens
CVRTENLAKYVAELS

SEQ ID NO: 1797 - protein, 15 aa, Homo sapiens
YLAVNFLDRFLSCMS

SEQ ID NO: 1798 - protein, 15 aa, Homo sapiens
LANYTVNKHFWPETL

SEQ ID NO: 1799 - protein, 15 aa, Homo sapiens
HKAYLDIPHRPQQAI

SEQ ID NO: 1800 - protein, 15 aa, Homo sapiens
ETGFPAIMYPGSFIG

SEQ ID NO: 1801 - protein, 15 aa, Homo sapiens
LVEVGEEYKLRAETL

SEQ ID NO: 1802 - protein, 15 aa, Homo sapiens
ASKYLCVSLMEPPAV

SEQ ID NO: 1803 - protein, 15 aa, Homo sapiens
KRQLLKMEHLLLKVL

SEQ ID NO: 1804 - protein, 15 aa, Homo sapiens
LKMEHLLLKVLAFDL

SEQ ID NO: 1805 - protein, 15 aa, Homo sapiens
NQFLLQYLRRQGVCV

SEQ ID NO: 1806 - protein, 15 aa, Homo sapiens
CVRTENLAKYVAELS

SEQ ID NO: 1807 - protein, 267 aa, Homo sapiens
MTLGRRLACLFLACVLPALLLGGTALASEIVGGRRARPHAWPFMVSLQLRGGHFCGATLIAPNFVMSAAHCVANVNVRAVRVVLGAHNLSRREPTRQVFAVQRIFENGYDPVNLLNDIVILQLNGSATINANVQVAQLPAQGRRLGNGVQCLAMGWGLLGRNRGIASVLQELNVTVVTSLCRRSNVCTLVRGRQAGVCFGDSGSPLVCNGLIHGIASFVRGGCASGLYPDAFAPVAQFVNWIDSIIQRSEDNPCPHPRDPDPASRTH

SEQ ID NO: 1808 - protein, 11 aa, Homo sapiens
FVRGGCASGLY

SEQ ID NO: 1809 - protein, 11 aa, Homo sapiens
FAVQRIFENGY

SEQ ID NO: 1810 - protein, 10 aa, Homo sapiens
AVQRIFENGY

SEQ ID NO: 1811 - protein, 10 aa, Homo sapiens
GYDPVNLLND

SEQ ID NO: 1812 - protein, 10 aa, Homo sapiens
VRGGCASGLY

SEQ ID NO: 1813 - protein, 10 aa, Homo sapiens
ASEIVGGRRA

SEQ ID NO: 1814 - protein, 10 aa, Homo sapiens
FGDSGSPLVC

SEQ ID NO: 1815 - protein, 9 aa, Homo sapiens
VQRIFENGY

SEQ ID NO: 1816 - protein, 9 aa, Homo sapiens
RGGCASGLY

SEQ ID NO: 1817 - protein, 9 aa, Homo sapiens
LNDIVILQL

SEQ ID NO: 1818 - protein, 10 aa, Homo sapiens
LLNDIVILQL

SEQ ID NO: 1819 - protein, 10 aa, Homo sapiens
RLACLFLACV

SEQ ID NO: 1820 - protein, 10 aa, Homo sapiens
GLYPDAFAPV

SEQ ID NO: 1821 - protein, 9 aa, Homo sapiens
FLACVLPAL

SEQ ID NO: 1822 - protein, 9 aa, Homo sapiens
NLLNDIVIL

SEQ ID NO: 1823 - protein, 9 aa, Homo sapiens
VLQELNVTV

SEQ ID NO: 1824 - protein, 9 aa, Homo sapiens
ALLLGGTAL

SEQ ID NO: 1825 - protein, 9 aa, Homo sapiens
GIASVLQEL

SEQ ID NO: 1826 - protein, 9 aa, Homo sapiens
TLGRRLACL

SEQ ID NO: 1827 - protein, 9 aa, Homo sapiens
LLLGGTALA

SEQ ID NO: 1828 - protein, 10 aa, Homo sapiens
VVLGAHNLSR

SEQ ID NO: 1829 - protein, 10 aa, Homo sapiens
LVRGRQAGVC

SEQ ID NO: 1830 - protein, 10 aa, Homo sapiens
AVQRIFENGY

SEQ ID NO: 1831 - protein, 9 aa, Homo sapiens
NVRAVRVVL

SEQ ID NO: 1832 - protein, 9 aa, Homo sapiens
GLIHGIASF

SEQ ID NO: 1833 - protein, 9 aa, Homo sapiens
ALLLGGTAL

SEQ ID NO: 1834 - protein, 9 aa, Homo sapiens
AVRVVLGAH

SEQ ID NO: 1835 - protein, 9 aa, Homo sapiens
NLSRREPTR

SEQ ID NO: 1836 - protein, 9 aa, Homo sapiens
SLQLRGGHF

SEQ ID NO: 1837 - protein, 9 aa, Homo sapiens
FVRGGCASG

SEQ ID NO: 1838 - protein, 10 aa, Homo sapiens
VVLGAHNLSR

SEQ ID NO: 1839 - protein, 10 aa, Homo sapiens
PTRQVFAVQR

SEQ ID NO: 1840 - protein, 10 aa, Homo sapiens
NVTVVTSLCR

SEQ ID NO: 1841 - protein, 10 aa, Homo sapiens
ALASEIVGGR

SEQ ID NO: 1842 - protein, 10 aa, Homo sapiens
QVAQLPAQGR

SEQ ID NO: 1843 - protein, 9 aa, Homo sapiens
RSNVCTLVR

SEQ ID NO: 1844 - protein, 9 aa, Homo sapiens
VTVVTSLCR

SEQ ID NO: 1845 - protein, 9 aa, Homo sapiens
ASEIVGGRR

SEQ ID NO: 1846 - protein, 9 aa, Homo sapiens
AMGWGLLGR

SEQ ID NO: 1847 - protein, 9 aa, Homo sapiens
NVCTLVRGR

SEQ ID NO: 1848 - protein, 10 aa, Homo sapiens
LFLACVLPAL

SEQ ID NO: 1849 - protein, 10 aa, Homo sapiens
VSLQLRGGHF

SEQ ID NO: 1850 - protein, 10 aa, Homo sapiens
VNLLNDIVIL

SEQ ID NO: 1851 - protein, 10 aa, Homo sapiens
QCLAMGWGLL

SEQ ID NO: 1852 - protein, 10 aa, Homo sapiens
GSPLVCNGLI

SEQ ID NO: 1853 - protein, 9 aa, Homo sapiens
CFGDSGSPL

SEQ ID NO: 1854 - protein, 9 aa, Homo sapiens
QFVNWIDSI

SEQ ID NO: 1855 - protein, 9 aa, Homo sapiens
NGYDPVNLL

SEQ ID NO: 1856 - protein, 9 aa, Homo sapiens
GYDPVNLLN

SEQ ID NO: 1857 - protein, 9 aa, Homo sapiens
LYPDAFAPV

SEQ ID NO: 1858 - protein, 10 aa, Homo sapiens
ELNVTVVTSL

SEQ ID NO: 1859 - protein, 10 aa, Homo sapiens
ENGYDPVNLL

SEQ ID NO: 1860 - protein, 10 aa, Homo sapiens
MTLGRRLACL

SEQ ID NO: 1861 - protein, 10 aa, Homo sapiens
AVQRIFENGY

SEQ ID NO: 1862 - protein, 10 aa, Homo sapiens
DIVILQLNGS

SEQ ID NO: 1863 - protein, 10 aa, Homo sapiens
FVRGGCASGL

SEQ ID NO: 1864 - protein, 9 aa, Homo sapiens
DAFAPVAQF

SEQ ID NO: 1865 - protein, 9 aa, Homo sapiens
RVVLGAHNL

SEQ ID NO: 1866 - protein, 9 aa, Homo sapiens
QVFAVQRIF

SEQ ID NO: 1867 - protein, 9 aa, Homo sapiens
EIVGGRRAR

SEQ ID NO: 1868 - protein, 11 aa, Homo sapiens
CVANVNVRAVR

SEQ ID NO: 1869 - protein, 11 aa, Homo sapiens
FVNWIDSIIQR

SEQ ID NO: 1870 - protein, 11 aa, Homo sapiens
QVAQLPAQGRR

SEQ ID NO: 1871 - protein, 10 aa, Homo sapiens
PTRQVFAVQR

SEQ ID NO: 1872 - protein, 10 aa, Homo sapiens
VANVNVRAVR

SEQ ID NO: 1873 - protein, 9 aa, Homo sapiens
TVVTSLCRR

SEQ ID NO: 1874 - protein, 9 aa, Homo sapiens
LASEIVGGR

SEQ ID NO: 1875 - protein, 9 aa, Homo sapiens
NVCTLVRGR

SEQ ID NO: 1876 - protein, 9 aa, Homo sapiens
NWIDSIIQR

SEQ ID NO: 1877 - protein, 9 aa, Homo sapiens
EIVGGRRAR

SEQ ID NO: 1878 - protein, 10 aa, Homo sapiens
APVAQFVNWI

SEQ ID NO: 1879 - protein, 10 aa, Homo sapiens
CPHPRDPDPA

SEQ ID NO: 1880 - protein, 10 aa, Homo sapiens
LPALLLGGTA

SEQ ID NO: 1881 - protein, 9 aa, Homo sapiens
WPFMVSLQL

SEQ ID NO: 1882 - protein, 9 aa, Homo sapiens
YPDAFAPVA

SEQ ID NO: 1883 - protein, 9 aa, Homo sapiens
APNFVMSAA

SEQ ID NO: 1884 - protein, 9 aa, Homo sapiens
EPTRQVFAV

SEQ ID NO: 1885 - protein, 9 aa, Homo sapiens
RPHAWPFMV

SEQ ID NO: 1886 - protein, 9 aa, Homo sapiens
ACVLPALLL

SEQ ID NO: 1887 - protein, 9 aa, Homo sapiens
NVRAVRVVL

SEQ ID NO: 1888 - protein, 9 aa, Homo sapiens
TLGRRLACL

SEQ ID NO: 1889 - protein, 9 aa, Homo sapiens
SLQLRGGHF

SEQ ID NO: 1890 - protein, 9 aa, Homo sapiens
GLLGRNRGI

SEQ ID NO: 1891 - protein, 9 aa, Homo sapiens
GRRLACLFL

SEQ ID NO: 1892 - protein, 9 aa, Homo sapiens
FLACVLPAL

SEQ ID NO: 1893 - protein, 9 aa, Homo sapiens
ALLLGGTAL

SEQ ID NO: 1894 - protein, 9 aa, Homo sapiens
NLLNDIVIL

SEQ ID NO: 1895 - protein, 8 aa, Homo sapiens
VRAVRVVL

SEQ ID NO: 1896 - protein, 8 aa, Homo sapiens
SPLVCNGL

SEQ ID NO: 1897 - protein, 8 aa, Homo sapiens
CLFLACVL

SEQ ID NO: 1898 - protein, 10 aa, Homo sapiens
RQVFAVQRIF

SEQ ID NO: 1899 - protein, 10 aa, Homo sapiens
TLGRRLACLF

SEQ ID NO: 1900 - protein, 10 aa, Homo sapiens
AVQRIFENGY

SEQ ID NO: 1901 - protein, 10 aa, Homo sapiens
ALLLGGTALA

SEQ ID NO: 1902 - protein, 10 aa, Homo sapiens
ILQLNGSATI

SEQ ID NO: 1903 - protein, 10 aa, Homo sapiens
RLGNGVQCLA

SEQ ID NO: 1904 - protein, 9 aa, Homo sapiens
VQRIFENGY

SEQ ID NO: 1905 - protein, 9 aa, Homo sapiens
GLIHGIASF

SEQ ID NO: 1906 - protein, 9 aa, Homo sapiens
SLQLRGGHF

SEQ ID NO: 1907 - protein, 9 aa, Homo sapiens
QVFAVQRIF

SEQ ID NO: 1908 - protein, 9 aa, Homo sapiens
DAFAPVAQF

SEQ ID NO: 1909 - protein, 9 aa, Homo sapiens
LGRRLACLF

SEQ ID NO: 1910 - protein, 9 aa, Homo sapiens
NVRAVRVVL

SEQ ID NO: 1911 - protein, 9 aa, Homo sapiens
ASGLYPDAF

SEQ ID NO: 1912 - protein, 9 aa, Homo sapiens
ACLFLACVL

SEQ ID NO: 1913 - protein, 9 aa, Homo sapiens
GATLIAPNF

SEQ ID NO: 1914 - protein, 8 aa, Homo sapiens
REPTRQVF

SEQ ID NO: 1915 - protein, 8 aa, Homo sapiens
QELNVTVV

SEQ ID NO: 1916 - protein, 8 aa, Homo sapiens
ANVQVAQL

SEQ ID NO: 1917 - protein, 8 aa, Homo sapiens
ACVLPALL

SEQ ID NO: 1918 - protein, 10 aa, Homo sapiens
RRLGNGVQCL

SEQ ID NO: 1919 - protein, 10 aa, Homo sapiens
RRARPHAWPF

SEQ ID NO: 1920 - protein, 10 aa, Homo sapiens
GRNRGIASVL

SEQ ID NO: 1921 - protein, 10 aa, Homo sapiens
RRSNVCTLVR

SEQ ID NO: 1922 - protein, 10 aa, Homo sapiens
VRVVLGAHNL

SEQ ID NO: 1923 - protein, 9 aa, Homo sapiens
RREPTRQVF

SEQ ID NO: 1924 - protein, 9 aa, Homo sapiens
GRRLACLFL

SEQ ID NO: 1925 - protein, 9 aa, Homo sapiens
VRGGCASGL

SEQ ID NO: 1926 - protein, 9 aa, Homo sapiens
TRQVFAVQR

SEQ ID NO: 1927 - protein, 9 aa, Homo sapiens
PRDPDPASR

SEQ ID NO: 1928 - protein, 10 aa, Homo sapiens
APVAQFVNWI

SEQ ID NO: 1929 - protein, 10 aa, Homo sapiens
LFLACVLPAL

SEQ ID NO: 1930 - protein, 10 aa, Homo sapiens
VNVRAVRVVL

SEQ ID NO: 1931 - protein, 10 aa, Homo sapiens
YPDAFAPVAQ

SEQ ID NO: 1932 - protein, 9 aa, Homo sapiens
WPFMVSLQL

SEQ ID NO: 1933 - protein, 9 aa, Homo sapiens
DPVNLLNDI

SEQ ID NO: 1934 - protein, 9 aa, Homo sapiens
SPLVCNGLI

SEQ ID NO: 1935 - protein, 9 aa, Homo sapiens
ACLFLACVL

SEQ ID NO: 1936 - protein, 9 aa, Homo sapiens
NLLNDIVIL

SEQ ID NO: 1937 - protein, 9 aa, Homo sapiens
RNRGIASVL

SEQ ID NO: 1938 - protein, 10 aa, Homo sapiens
RARPHAWPFM

SEQ ID NO: 1939 - protein, 10 aa, Homo sapiens
VSLQLRGGHF

SEQ ID NO: 1940 - protein, 10 aa, Homo sapiens
GSPLVCNGLI

SEQ ID NO: 1941 - protein, 10 aa, Homo sapiens
LACVLPALLL

SEQ ID NO: 1942 - protein, 9 aa, Homo sapiens
RVVLGAHNL

SEQ ID NO: 1943 - protein, 9 aa, Homo sapiens
QVFAVQRIF

SEQ ID NO: 1944 - protein, 9 aa, Homo sapiens
GATLIAPNF

SEQ ID NO: 1945 - protein, 9 aa, Homo sapiens
ASGLYPDAF

SEQ ID NO: 1946 - protein, 9 aa, Homo sapiens
GATLIAPNF

SEQ ID NO: 1947 - protein, 9 aa, Homo sapiens
ASGLYPDAF

SEQ ID NO: 1948 - protein, 15 aa, Homo sapiens
PHAWPFMVSLQLRGG

SEQ ID NO: 1949 - protein, 15 aa, Homo sapiens
LNDIVILQLNGSATI

SEQ ID NO: 1950 - protein, 15 aa, Homo sapiens
CLFLACVLPALLLGG

SEQ ID NO: 1951 - protein, 15 aa, Homo sapiens
APNFVMSAAHCVANV

SEQ ID NO: 1952 - protein, 15 aa, Homo sapiens
ASFVRGGCASGLYPD

SEQ ID NO: 1953 - protein, 15 aa, Homo sapiens
VLPALLLGGTALASE

SEQ ID NO: 1954 - protein, 15 aa, Homo sapiens
ALASEIVGGRRARPH

SEQ ID NO: 1955 - protein, 15 aa, Homo sapiens
RAVRVVLGAHNLSRR

SEQ ID NO: 1956 - protein, 15 aa, Homo sapiens
YDPVNLLNDIVILQL

SEQ ID NO: 1957 - protein, 15 aa, Homo sapiens
NVQVAQLPAQGRRLG

SEQ ID NO: 1958 - protein, 15 aa, Homo sapiens
VFAVQRIFENGYDPV

SEQ ID NO: 1959 - protein, 15 aa, Homo sapiens
PVNLLNDIVILQLNG

SEQ ID NO: 1960 - protein, 15 aa, Homo sapiens
ASGLYPDAFAPVAQF

SEQ ID NO: 1961 - protein, 15 aa, Homo sapiens
CLFLACVLPALLLGG

SEQ ID NO: 1962 - protein, 15 aa, Homo sapiens
IFENGYDPVNLLNDI

SEQ ID NO: 1963 - protein, 15 aa, Homo sapiens
IASVLQELNVTVVTS

SEQ ID NO: 1964 - protein, 15 aa, Homo sapiens
ACLFLACVLPALLLG

SEQ ID NO: 1965 - protein, 15 aa, Homo sapiens
VRVVLGAHNLSRREP

SEQ ID NO: 1966 - protein, 15 aa, Homo sapiens
VNLLNDIVILQLNGS

SEQ ID NO: 1967 - protein, 15 aa, Homo sapiens
NDIVILQLNGSATIN

SEQ ID NO: 1968 - protein, 15 aa, Homo sapiens
PDAFAPVAQFVNWID

SEQ ID NO: 1969 - protein, 15 aa, Homo sapiens
PNFVMSAAHCVANVN

SEQ ID NO: 1970 - protein, 15 aa, Homo sapiens
NRGIASVLQELNVTV

SEQ ID NO: 1971 - protein, 15 aa, Homo sapiens
IASVLQELNVTVVTS

SEQ ID NO: 1972 - protein, 15 aa, Homo sapiens
VTVVTSLCRRSNVCT

SEQ ID NO: 1973 - protein, 15 aa, Homo sapiens
RSNVCTLVRGRQAGV

SEQ ID NO: 1974 - protein, 15 aa, Homo sapiens
AQFVNWIDSIIQRSE

SEQ ID NO: 1975 - protein, 15 aa, Homo sapiens
PHAWPFMVSLQLRGG

SEQ ID NO: 1976 - protein, 15 aa, Homo sapiens
AMGWGLLGRNRGIAS

SEQ ID NO: 1977 - protein, 15 aa, Homo sapiens
GVCFGDSGSPLVCNG

SEQ ID NO: 1978 - protein, 15 aa, Homo sapiens
GVCFGDSGSPLVCNG

SEQ ID NO: 1979 - protein, 15 aa, Homo sapiens
PHAWPFMVSLQLRGG

SEQ ID NO: 1980 - protein, 15 aa, Homo sapiens
VFAVQRIFENGYDPV

SEQ ID NO: 1981 - protein, 15 aa, Homo sapiens
ILQLNGSATINANVQ

SEQ ID NO: 1982 - protein, 15 aa, Homo sapiens
APNFVMSAAHCVANV

SEQ ID NO: 1983 - protein, 15 aa, Homo sapiens
IVILQLNGSATINAN

SEQ ID NO: 1984 - protein, 15 aa, Homo sapiens
LQELNVTVVTSLCRR

SEQ ID NO: 1985 - protein, 15 aa, Homo sapiens
VAQFVNWIDSIIQRS

SEQ ID NO: 1986 - protein, 15 aa, Homo sapiens
YDPVNLLNDIVILQL

SEQ ID NO: 1987 - protein, 15 aa, Homo sapiens
VNLLNDIVILQLNGS

SEQ ID NO: 1988 - protein, 15 aa, Homo sapiens
AMGWGLLGRNRGIAS

SEQ ID NO: 1989 - protein, 15 aa, Homo sapiens
RSNVCTLVRGRQAGV

SEQ ID NO: 1990 - protein, 15 aa, Homo sapiens
VTVVTSLCRRSNVCT

SEQ ID NO: 1991 - protein, 15 aa, Homo sapiens
ASEIVGGRRARPHAW

SEQ ID NO: 1992 - protein, 15 aa, Homo sapiens
VAQLPAQGRRLGNGV

SEQ ID NO: 1993 - protein, 15 aa, Homo sapiens
PNFVMSAAHCVANVN

SEQ ID NO: 1994 - protein, 15 aa, Homo sapiens
AVRVVLGAHNLSRRE

SEQ ID NO: 1995 - protein, 15 aa, Homo sapiens
VLGAHNLSRREPTRQ

SEQ ID NO: 1996 - protein, 15 aa, Homo sapiens
TRQVFAVQRIFENGY

SEQ ID NO: 1997 - protein, 15 aa, Homo sapiens
GWGLLGRNRGIASVL

SEQ ID NO: 1998 - protein, 15 aa, Homo sapiens
PALLLGGTALASEIV

SEQ ID NO: 1999 - protein, 15 aa, Homo sapiens
VRVVLGAHNLSRREP

SEQ ID NO: 2000 - protein, 15 aa, Homo sapiens
RIFENGYDPVNLLND

SEQ ID NO: 2001 - protein, 15 aa, Homo sapiens
ILQLNGSATINANVQ

SEQ ID NO: 2002 - protein, 15 aa, Homo sapiens
VQCLAMGWGLLGRNR

SEQ ID NO: 2003 - protein, 15 aa, Homo sapiens
WGLLGRNRGIASVLQ

SEQ ID NO: 2004 - protein, 15 aa, Homo sapiens
IASVLQELNVTVVTS

SEQ ID NO: 2005 - protein, 15 aa, Homo sapiens
ELNVTVVTSLCRRSN

SEQ ID NO: 2006 - protein, 15 aa, Homo sapiens
VTSLCRRSNVCTLVR

SEQ ID NO: 2007 - protein, 15 aa, Homo sapiens
NGLIHGIASFVRGGC

SEQ ID NO: 2008 - protein, 386 aa, Epstein-Barr virus
MEHDLERGPPGPRRPPRGPPLSSSLGLALLLLLLALLFWLYIVMSDWTGGALLVLYSFALMLIIIILIIFIFRRDLLCPLGALCILLLMITLLLIALWNLHGQALFLGIVLFIFGCLLVLGIWIYLLEMLWRLGATIWQLLAFFLAFFLDLILLIIALYLQQNWWTLLVDLLWLLLFLAILIWMYYHGQRHSDEHHHDDSLPHPQQATDDSGHESDSNSNEGRHHLLVSGAGDGPPLCSQNLGAPGGGPDNGPQDPDNTDDNGPQDPDNTDDNGPHDPLPQDPDNTDDNGPQDPDNTDDNGPHDPLPHSPSDSAGNDGGPPQLTEEVENKGGDQGPPLMTDGGGGHSHDSGHGGGDPHLPTLLLGSSGSGGDDDDPHGPVQLSYYD

SEQ ID NO: 2009 - protein, 9 aa, Epstein-Barr virus
LLALLFWLY

SEQ ID NO: 2010 - protein, 10 aa, Epstein-Barr virus
WTGGALLVLY

SEQ ID NO: 2011 - protein, 11 aa, Epstein-Barr virus
LLLLALLFWLY

SEQ ID NO: 2012 - protein, 11 aa, Epstein-Barr virus
MSDWTGGALLV

SEQ ID NO: 2013 - protein, 11 aa, Epstein-Barr virus
DWTGGALLVLY

SEQ ID NO: 2014 - protein, 9 aa, Epstein-Barr virus
ALLLLLLAL

SEQ ID NO: 2015 - protein, 9 aa, Epstein-Barr virus
LLLLLLALL

SEQ ID NO: 2016 - protein, 9 aa, Epstein-Barr virus
YLLEMLWRL

SEQ ID NO: 2017 - protein, 9 aa, Epstein-Barr virus
GLALLLLLL

SEQ ID NO: 2018 - protein, 9 aa, Epstein-Barr virus
LLLALLFWL

SEQ ID NO: 2019 - protein, 9 aa, Epstein-Barr virus
ALFLGIVLF

SEQ ID NO: 2020 - protein, 9 aa, Epstein-Barr virus
QLLAFFLAF

SEQ ID NO: 2021 - protein, 9 aa, Epstein-Barr virus
LLLLLALLF

SEQ ID NO: 2022 - protein, 9 aa, Epstein-Barr virus
MLWRLGATI

SEQ ID NO: 2023 - protein, 9 aa, Epstein-Barr virus
QLTEEVENK

SEQ ID NO: 2024 - protein, 9 aa, Epstein-Barr virus
SSLGLALLL

SEQ ID NO: 2025 - protein, 9 aa, Epstein-Barr virus
IILIIFIFR

SEQ ID NO: 2026 - protein, 10 aa, Epstein-Barr virus
SSSLGLALLL

SEQ ID NO: 2027 - protein, 10 aa, Epstein-Barr virus
IIILIIFIFR

SEQ ID NO: 2028 - protein, 10 aa, Epstein-Barr virus
ESDSNSNEGR

SEQ ID NO: 2029 - protein, 9 aa, Epstein-Barr virus
LYSFALMLI

SEQ ID NO: 2030 - protein, 9 aa, Epstein-Barr virus
FFLDLILLI

SEQ ID NO: 2031 - protein, 9 aa, Epstein-Barr virus
IFIFRRDLL

SEQ ID NO: 2032 - protein, 10 aa, Epstein-Barr virus
IYLLEMLWRL

SEQ ID NO: 2033 - protein, 10 aa, Epstein-Barr virus
LYLQQNWWTL

SEQ ID NO: 2034 - protein, 9 aa, Epstein-Barr virus
DLILLIIAL

SEQ ID NO: 2035 - protein, 9 aa, Epstein-Barr virus
ATIWQLLAF

SEQ ID NO: 2036 - protein, 9 aa, Epstein-Barr virus
LIIIILIIF

SEQ ID NO: 2037 - protein, 9 aa, Epstein-Barr virus
EVENKGGDQ

SEQ ID NO: 2038 - protein, 10 aa, Epstein-Barr virus
LVDLLWLLLF

SEQ ID NO: 2039 - protein, 11 aa, Epstein-Barr virus
IIIILIIFIFR

SEQ ID NO: 2040 - protein, 9 aa, Epstein-Barr virus
IILIIFIFR

SEQ ID NO: 2041 - protein, 10 aa, Epstein-Barr virus
IIILIIFIFR

SEQ ID NO: 2042 - protein, 9 aa, Epstein-Barr virus
ILIIFIFRR

SEQ ID NO: 2043 - protein, 10 aa, Epstein-Barr virus
DLERGPPGPR

SEQ ID NO: 2044 - protein, 9 aa, Epstein-Barr virus
DPHLPTLLL

SEQ ID NO: 2045 - protein, 9 aa, Epstein-Barr virus
PPLSSSLGL

SEQ ID NO: 2046 - protein, 9 aa, Epstein-Barr virus
GPPLCSQNL

SEQ ID NO: 2047 - protein, 10 aa, Epstein-Barr virus
GPPLSSSLGL

SEQ ID NO: 2048 - protein, 10 aa, Epstein-Barr virus
CPLGALCILL

SEQ ID NO: 2049 - protein, 8 aa, Epstein-Barr virus
FIFRRDLL

SEQ ID NO: 2050 - protein, 9 aa, Epstein-Barr virus
SNEGRHHLL

SEQ ID NO: 2051 - protein, 9 aa, Epstein-Barr virus
SLGLALLLL

SEQ ID NO: 2052 - protein, 9 aa, Epstein-Barr virus
ILLLMITLL

SEQ ID NO: 2053 - protein, 9 aa, Epstein-Barr virus
DLILLIIAL

SEQ ID NO: 2054 - protein, 9 aa, Epstein-Barr virus
ALFLGIVLF

SEQ ID NO: 2055 - protein, 10 aa, Epstein-Barr virus
CLLVLGIWIY

SEQ ID NO: 2056 - protein, 10 aa, Epstein-Barr virus
LLLALLFWLY

SEQ ID NO: 2057 - protein, 10 aa, Epstein-Barr virus
MLIIIILIIF

SEQ ID NO: 2058 - protein, 10 aa, Epstein-Barr virus
DLILLIIALY

SEQ ID NO: 2059 - protein, 9 aa, Epstein-Barr virus
DEHHHDDSL

SEQ ID NO: 2060 - protein, 9 aa, Epstein-Barr virus
DLILLIIAL

SEQ ID NO: 2061 - protein, 8 aa, Epstein-Barr virus
NEGRHHLL

SEQ ID NO: 2062 - protein, 8 aa, Epstein-Barr virus
DLLWLLLF

SEQ ID NO: 2063 - protein, 8 aa, Epstein-Barr virus
EEVENKGG

SEQ ID NO: 2064 - protein, 10 aa, Epstein-Barr virus
WRLGATIWQL

SEQ ID NO: 2065 - protein, 10 aa, Epstein-Barr virus
PRGPPLSSSL

SEQ ID NO: 2066 - protein, 9 aa, Epstein-Barr virus
RRPPRGPPL

SEQ ID NO: 2067 - protein, 9 aa, Epstein-Barr virus
ERGPPGPRR

SEQ ID NO: 2068 - protein, 9 aa, Epstein-Barr virus
FRRDLLCPL

SEQ ID NO: 2069 - protein, 9 aa, Epstein-Barr virus
PPLSSSLGL

SEQ ID NO: 2070 - protein, 9 aa, Epstein-Barr virus
DPHLPTLLL

SEQ ID NO: 2071 - protein, 9 aa, Epstein-Barr virus
GPPLCSQNL

SEQ ID NO: 2072 - protein, 10 aa, Epstein-Barr virus
CPLGALCILL

SEQ ID NO: 2073 - protein, 10 aa, Epstein-Barr virus
DPHGPVQLSY

SEQ ID NO: 2074 - protein, 9 aa, Epstein-Barr virus
SSLGLALLL

SEQ ID NO: 2075 - protein, 9 aa, Epstein-Barr virus
ITLLLIALW

SEQ ID NO: 2076 - protein, 9 aa, Epstein-Barr virus
LSSSLGLAL

SEQ ID NO: 2077 - protein, 10 aa, Epstein-Barr virus
SSSLGLALLL

SEQ ID NO: 2078 - protein, 10 aa, Epstein-Barr virus
NSNEGRHHLL

SEQ ID NO: 2079 - protein, 15 aa, Epstein-Barr virus
LALLLLLLALLFWLY

SEQ ID NO: 2080 - protein, 15 aa, Epstein-Barr virus
RDLLCPLGALCILLL

SEQ ID NO: 2081 - protein, 15 aa, Epstein-Barr virus
LIALWNLHGQALFLG

SEQ ID NO: 2082 - protein, 15 aa, Epstein-Barr virus
GATIWQLLAFFLAFF

SEQ ID NO: 2083 - protein, 15 aa, Epstein-Barr virus
LGIVLFIFGCLLVLG

SEQ ID NO: 2084 - protein, 15 aa, Epstein-Barr virus
WWTLLVDLLWLLLFL

SEQ ID NO: 2085 - protein, 15 aa, Epstein-Barr virus
IFIFRRDLLCPLGAL

SEQ ID NO: 2086 - protein, 15 aa, Epstein-Barr virus
IILIIFIFRRDLLCP

SEQ ID NO: 2087 - protein, 15 aa, Epstein-Barr virus
ILIIFIFRRDLLCPL

SEQ ID NO: 2088 - protein, 15 aa, Epstein-Barr virus
GLALLLLLLALLFWL

SEQ ID NO: 2089 - protein, 15 aa, Epstein-Barr virus
LFWLYIVMSDWTGGA

SEQ ID NO: 2090 - protein, 15 aa, Epstein-Barr virus
LYIVMSDWTGGALLV

SEQ ID NO: 2091 - protein, 15 aa, Epstein-Barr virus
GGALLVLYSFALMLI

SEQ ID NO: 2092 - protein, 15 aa, Epstein-Barr virus
IILIIFIFRRDLLCP

SEQ ID NO: 2093 - protein, 15 aa, Epstein-Barr virus
ILIIFIFRRDLLCPL

SEQ ID NO: 2094 - protein, 15 aa, Epstein-Barr virus
HDPLPHSPSDSAGND

SEQ ID NO: 2095 - protein, 15 aa, Epstein-Barr virus
GGALLVLYSFALMLI

SEQ ID NO: 2096 - protein, 15 aa, Epstein-Barr virus
LVLYSFALMLIIIIL

SEQ ID NO: 2097 - protein, 15 aa, Epstein-Barr virus
LCILLLMITLLLIAL

SEQ ID NO: 2098 - protein, 15 aa, Epstein-Barr virus
LWRLGATIWQLLAFF

SEQ ID NO: 2099 - protein, 15 aa, Epstein-Barr virus
IYLLEMLWRLGATIW

SEQ ID NO: 2100 - protein, 15 aa, Epstein-Barr virus
FWLYIVMSDWTGGAL

SEQ ID NO: 2101 - protein, 15 aa, Epstein-Barr virus
ATIWQLLAFFLAFFL

SEQ ID NO: 2102 - protein, 15 aa, Epstein-Barr virus
IILIIFIFRRDLLCP

SEQ ID NO: 2103 - protein, 15 aa, Epstein-Barr virus
QNWWTLLVDLLWLLL

SEQ ID NO: 2104 - protein, 15 aa, Epstein-Barr virus
WQLLAFFLAFFLDLI

SEQ ID NO: 2105 - protein, 15 aa, Epstein-Barr virus
LLWLLLFLAILIWMY

SEQ ID NO: 2106 - protein, 15 aa, Epstein-Barr virus
LLALLFWLYIVMSDW

SEQ ID NO: 2107 - protein, 15 aa, Epstein-Barr virus
LLVLYSFALMLIIII

SEQ ID NO: 2108 - protein, 15 aa, Epstein-Barr virus
GIVLFIFGCLLVLGI

SEQ ID NO: 2109 - protein, 497 aa, Epstein-Barr virus
MGSLEMVPMGAGPPSPGGDPDGYDGGNNSQYPSASGSSGNTPTPPNDEERESNEEPPPPYEDPYWGNGDRHSDYQPLGTQDQSLYLGLQHDGNDGLPPPPYSPRDDSSQHIYEEAGRGSMNPVCLPVIVAPYLFWLAAIAASCFTASVSTVVTATGLALSLLLLAAVASSYAAAQRKLLTPVTVLTAVVTFFAICLTWRIEDPPFNSLLFALLAAAGGLQGIYVLVMLVLLILAYRRRWRRLTVCGGIMFLACVLVLIVDAVLQLSPLLGAVTVVSMTLLLLAFVLWLSSPGGLGTLGAALLTLAAALALLASLILGTLNLTTMFLLMLLWTLVVLLICSSCSSCPLSKILLARLFLYALALLLLASALIAGGSILQTNFKSLSSTEFIPNLFCMLLLIVAGILFILAILTEWGSGNRTYGPVFMCLGGLLTMVAGAVWLTVMSNTLLSAWILTAGFLIFLIGFALFGVIRCCRYCCYYCLTLESEERPPTPYRNTV

SEQ ID NO: 2110 - protein, 9 aa, Epstein-Barr virus
RDDSSQHIY

SEQ ID NO: 2111 - protein, 10 aa, Epstein-Barr virus
ESEERPPTPY

SEQ ID NO: 2112 - protein, 10 aa, Epstein-Barr virus
GYDGGNNSQY

SEQ ID NO: 2113 - protein, 10 aa, Epstein-Barr virus
GNDGLPPPPY

SEQ ID NO: 2114 - protein, 11 aa, Epstein-Barr virus
LTEWGSGNRTY

SEQ ID NO: 2115 - protein, 9 aa, Epstein-Barr virus
LLLAFVLWL

SEQ ID NO: 2116 - protein, 9 aa, Epstein-Barr virus
FLLMLLWTL

SEQ ID NO: 2117 - protein, 10 aa, Epstein-Barr virus
LLASLILGTL

SEQ ID NO: 2118 - protein, 10 aa, Epstein-Barr virus
LLARLFLYAL

SEQ ID NO: 2119 - protein, 10 aa, Epstein-Barr virus
FLIGFALFGV

SEQ ID NO: 2120 - protein, 9 aa, Epstein-Barr virus
LLAAVASSY

SEQ ID NO: 2121 - protein, 9 aa, Epstein-Barr virus
ALIAGGSIL

SEQ ID NO: 2122 - protein, 9 aa, Epstein-Barr virus
SLLLLAAVA

SEQ ID NO: 2123 - protein, 10 aa, Epstein-Barr virus
LLLAAVASSY

SEQ ID NO: 2124 - protein, 10 aa, Epstein-Barr virus
QLSPLLGAVT

SEQ ID NO: 2125 - protein, 9 aa, Epstein-Barr virus
SSYAAAQRK

SEQ ID NO: 2126 - protein, 9 aa, Epstein-Barr virus
GSILQTNFK

SEQ ID NO: 2127 - protein, 10 aa, Epstein-Barr virus
SSCSSCPLSK

SEQ ID NO: 2128 - protein, 10 aa, Epstein-Barr virus
ASSYAAAQRK

SEQ ID NO: 2129 - protein, 10 aa, Epstein-Barr virus
AVLQLSPLLG

SEQ ID NO: 2130 - protein, 9 aa, Epstein-Barr virus
TYGPVFMCL

SEQ ID NO: 2131 - protein, 9 aa, Epstein-Barr virus
PYLFWLAAI

SEQ ID NO: 2132 - protein, 10 aa, Epstein-Barr virus
SYAAAQRKLL

SEQ ID NO: 2133 - protein, 10 aa, Epstein-Barr virus
IYVLVMLVLL

SEQ ID NO: 2134 - protein, 10 aa, Epstein-Barr virus
MFLACVLVLI

SEQ ID NO: 2135 - protein, 9 aa, Epstein-Barr virus
PVFMCLGGL

SEQ ID NO: 2136 - protein, 9 aa, Epstein-Barr virus
DAVLQLSPL

SEQ ID NO: 2137 - protein, 10 aa, Epstein-Barr virus
TVVSMTLLLL

SEQ ID NO: 2138 - protein, 10 aa, Epstein-Barr virus
TVVTATGLAL

SEQ ID NO: 2139 - protein, 10 aa, Epstein-Barr virus
VTVLTAVVTF

SEQ ID NO: 2140 - protein, 11 aa, Epstein-Barr virus
AVASSYAAAQR

SEQ ID NO: 2141 - protein, 11 aa, Epstein-Barr virus
VTFFAICLTWR

SEQ ID NO: 2142 - protein, 9 aa, Epstein-Barr virus
LVLLILAYR

SEQ ID NO: 2143 - protein, 9 aa, Epstein-Barr virus
PLSKILLAR

SEQ ID NO: 2144 - protein, 10 aa, Epstein-Barr virus
VASSYAAAQR

SEQ ID NO: 2145 - protein, 9 aa, Epstein-Barr virus
LPVIVAPYL

SEQ ID NO: 2146 - protein, 9 aa, Epstein-Barr virus
APYLFWLAA

SEQ ID NO: 2147 - protein, 10 aa, Epstein-Barr virus
IPNLFCMLLL

SEQ ID NO: 2148 - protein, 10 aa, Epstein-Barr virus
QPLGTQDQSL

SEQ ID NO: 2149 - protein, 10 aa, Epstein-Barr virus
SPGGLGTLGA

SEQ ID NO: 2150 - protein, 8 aa, Epstein-Barr virus
CPLSKILL

SEQ ID NO: 2151 - protein, 8 aa, Epstein-Barr virus
ILLARLFL

SEQ ID NO: 2152 - protein, 8 aa, Epstein-Barr virus
AAAQRKLL

SEQ ID NO: 2153 - protein, 9 aa, Epstein-Barr virus
AYRRRWRRL

SEQ ID NO: 2154 - protein, 9 aa, Epstein-Barr virus
LARLFLYAL

SEQ ID NO: 2155 - protein, 9 aa, Epstein-Barr virus
MLVLLILAY

SEQ ID NO: 2156 - protein, 9 aa, Epstein-Barr virus
CLPVIVAPY

SEQ ID NO: 2157 - protein, 9 aa, Epstein-Barr virus
LLAAVASSY

SEQ ID NO: 2158 - protein, 10 aa, Epstein-Barr virus
LLLAAVASSY

SEQ ID NO: 2159 - protein, 10 aa, Epstein-Barr virus
RLTVCGGIMF

SEQ ID NO: 2160 - protein, 9 aa, Epstein-Barr virus
SEERPPTPY

SEQ ID NO: 2161 - protein, 9 aa, Epstein-Barr virus
IEDPPFNSL

SEQ ID NO: 2162 - protein, 8 aa, Epstein-Barr virus
EERPPTPY

SEQ ID NO: 2163 - protein, 8 aa, Epstein-Barr virus
TEFIPNLF

SEQ ID NO: 2164 - protein, 8 aa, Epstein-Barr virus
NEEPPPPY

SEQ ID NO: 2165 - protein, 10 aa, Epstein-Barr virus
ARLFLYALAL

SEQ ID NO: 2166 - protein, 10 aa, Epstein-Barr virus
GRGSMNPVCL

SEQ ID NO: 2167 - protein, 10 aa, Epstein-Barr virus
RRLTVCGGIM

SEQ ID NO: 2168 - protein, 9 aa, Epstein-Barr virus
GGLQGIYVL

SEQ ID NO: 2169 - protein, 9 aa, Epstein-Barr virus
CRYCCYYCL

SEQ ID NO: 2170 - protein, 9 aa, Epstein-Barr virus
LPVIVAPYL

SEQ ID NO: 2171 - protein, 9 aa, Epstein-Barr virus
SPGGDPDGY

SEQ ID NO: 2172 - protein, 10 aa, Epstein-Barr virus
QPLGTQDQSL

SEQ ID NO: 2173 - protein, 10 aa, Epstein-Barr virus
PPFNSLLFAL

SEQ ID NO: 2174 - protein, 10 aa, Epstein-Barr virus
GPVFMCLGGL

SEQ ID NO: 2175 - protein, 9 aa, Epstein-Barr virus
KSLSSTEFI

SEQ ID NO: 2176 - protein, 9 aa, Epstein-Barr virus
SSCPLSKIL

SEQ ID NO: 2177 - protein, 10 aa, Epstein-Barr virus
LSKILLARLF

SEQ ID NO: 2178 - protein, 10 aa, Epstein-Barr virus
SSYAAAQRKL

SEQ ID NO: 2179 - protein, 10 aa, Epstein-Barr virus
LSSPGGLGTL

SEQ ID NO: 2180 - protein, 15 aa, Epstein-Barr virus
QTNFKSLSSTEFIPN

SEQ ID NO: 2181 - protein, 15 aa, Epstein-Barr virus
ALSLLLLAAVASSYA

SEQ ID NO: 2182 - protein, 15 aa, Epstein-Barr virus
PGGLGTLGAALLTLA

SEQ ID NO: 2183 - protein, 15 aa, Epstein-Barr virus
CMLLLIVAGILFILA

SEQ ID NO: 2184 - protein, 15 aa, Epstein-Barr virus
AGFLIFLIGFALFGV

SEQ ID NO: 2185 - protein, 15 aa, Epstein-Barr virus
YLGLQHDGNDGLPPP

SEQ ID NO: 2186 - protein, 15 aa, Epstein-Barr virus
VLVLIVDAVLQLSPL

SEQ ID NO: 2187 - protein, 15 aa, Epstein-Barr virus
AVWLTVMSNTLLSAW

SEQ ID NO: 2188 - protein, 15 aa, Epstein-Barr virus
YQPLGTQDQSLYLGL

SEQ ID NO: 2189 - protein, 15 aa, Epstein-Barr virus
VLVMLVLLILAYRRR

SEQ ID NO: 2190 - protein, 15 aa, Epstein-Barr virus
HSDYQPLGTQDQSLY

SEQ ID NO: 2191 - protein, 15 aa, Epstein-Barr virus
QSLYLGLQHDGNDGL

SEQ ID NO: 2192 - protein, 15 aa, Epstein-Barr virus
QHIYEEAGRGSMNPV

SEQ ID NO: 2193 - protein, 15 aa, Epstein-Barr virus
ASSYAAAQRKLLTPV

SEQ ID NO: 2194 - protein, 15 aa, Epstein-Barr virus
GAVWLTVMSNTLLSA

SEQ ID NO: 2195 - protein, 15 aa, Epstein-Barr virus
ASCFTASVSTVVTAT

SEQ ID NO: 2196 - protein, 15 aa, Epstein-Barr virus
ACVLVLIVDAVLQLS

SEQ ID NO: 2197 - protein, 15 aa, Epstein-Barr virus
VTFFAICLTWRIEDP

SEQ ID NO: 2198 - protein, 15 aa, Epstein-Barr virus
GAVWLTVMSNTLLSA

SEQ ID NO: 2199 - protein, 15 aa, Epstein-Barr virus
LSAWILTAGFLIFLI

SEQ ID NO: 2200 - protein, 15 aa, Epstein-Barr virus
QSLYLGLQHDGNDGL

SEQ ID NO: 2201 - protein, 15 aa, Epstein-Barr virus
LTEWGSGNRTYGPVF

SEQ ID NO: 2202 - protein, 15 aa, Epstein-Barr virus
PNLFCMLLLIVAGIL

SEQ ID NO: 2203 - protein, 15 aa, Epstein-Barr virus
NRTYGPVFMCLGGLL

SEQ ID NO: 2204 - protein, 15 aa, Epstein-Barr virus
VTVLTAVVTFFAICL

SEQ ID NO: 2205 - protein, 15 aa, Epstein-Barr virus
LTAVVTFFAICLTWR

SEQ ID NO: 2206 - protein, 15 aa, Epstein-Barr virus
FLLMLLWTLVVLLIC

SEQ ID NO: 2207 - protein, 15 aa, Epstein-Barr virus
LIFLIGFALFGVIRC

SEQ ID NO: 2208 - protein, 15 aa, Epstein-Barr virus
LAILTEWGSGNRTYG

SEQ ID NO: 2209 - protein, 15 aa, Epstein-Barr virus
LIGFALFGVIRCCRY

SEQ ID NO: 2210 - protein, 641 aa, Epstein-Barr virus
MSDEGPGTGPGNGLGEKGDTSGPEGSGGSGPQRRGGDNHGRGRGRGRGRGGGRPGAPGGSGSGPRHRDGVRRPQKRPSCIGCKGTHGGTGAGAGAGGAGAGGAGAGGGAGAGGGAGGAGGAGGAGAGGGAGAGGGAGGAGGAGAGGGAGAGGGAGGAGAGGGAGGAGGAGAGGGAGAGGGAGGAGAGGGAGGAGGAGAGGGAGAGGAGGAGGAGAGGAGAGGGAGGAGGAGAGGAGAGGAGAGGAGAGGAGGAGAGGAGGAGAGGAGGAGAGGGAGGAGAGGGAGGAGAGGAGGAGAGGAGGAGAGGAGGAGAGGGAGAGGAGAGGGGRGRGGSGGRGRGGSGGRGRGGSGGRRGRGRERARGGSRERARGRGRGRGEKRPRSPSSQSSSSGSPPRRPPPGRRPFFHPVGEADYFEYHQEGGPDGEPDVPPGAIEQGPADDPGEGPSTGPRGQGDGGRRKKGGWFGKHRGQGGSNPKFENIAEGLRALLARSHVERTTDEGTWVAGVFVYGGSKTSLYNLRRGTALAIPQCRLTPLSRLPFGMAPGPGPQPGPLRESIVCYFMVFLQTHIFAEVLKDAIKDLVMTKPAPTCNIRVTVCSFDDGVDLPPWFPPMVEGAAAEGDDGDDGDEGGDGDEGEEGQE

SEQ ID NO: 2211 - protein, 9 aa, Epstein-Barr virus
VGEADYFEY

SEQ ID NO: 2212 - protein, 9 aa, Epstein-Barr virus
TTDEGTWVA

SEQ ID NO: 2213 - protein, 9 aa, Epstein-Barr virus
TWVAGVFVY

SEQ ID NO: 2214 - protein, 10 aa, Epstein-Barr virus
GTWVAGVFVY

SEQ ID NO: 2215 - protein, 11 aa, Epstein-Barr virus
FVYGGSKTSLY

SEQ ID NO: 2216 - protein, 9 aa, Epstein-Barr virus
NIAEGLRAL

SEQ ID NO: 2217 - protein, 9 aa, Epstein-Barr virus
ALAIPQCRL

SEQ ID NO: 2218 - protein, 9 aa, Epstein-Barr virus
VLKDAIKDL

SEQ ID NO: 2219 - protein, 10 aa, Epstein-Barr virus
FLQTHIFAEV

SEQ ID NO: 2220 - protein, 10 aa, Epstein-Barr virus
AIPQCRLTPL

SEQ ID NO: 2221 - protein, 9 aa, Epstein-Barr virus
AIKDLVMTK

SEQ ID NO: 2222 - protein, 9 aa, Epstein-Barr virus
GVFVYGGSK

SEQ ID NO: 2223 - protein, 10 aa, Epstein-Barr virus
ALLARSHVER

SEQ ID NO: 2224 - protein, 10 aa, Epstein-Barr virus
RLTPLSRLPF

SEQ ID NO: 2225 - protein, 10 aa, Epstein-Barr virus
GLRALLARSH

SEQ ID NO: 2226 - protein, 9 aa, Epstein-Barr virus
GVFVYGGSK

SEQ ID NO: 2227 - protein, 9 aa, Epstein-Barr virus
GSGSGPRHR

SEQ ID NO: 2228 - protein, 10 aa, Epstein-Barr virus
QTHIFAEVLK

SEQ ID NO: 2229 - protein, 10 aa, Epstein-Barr virus
ALLARSHVER

SEQ ID NO: 2230 - protein, 10 aa, Epstein-Barr virus
GSKTSLYNLR

SEQ ID NO: 2231 - protein, 9 aa, Epstein-Barr virus
VYGGSKTSL

SEQ ID NO: 2232 - protein, 10 aa, Epstein-Barr virus
LYNLRRGTAL

SEQ ID NO: 2233 - protein, 9 aa, Epstein-Barr virus
KFENIAEGL

SEQ ID NO: 2234 - protein, 10 aa, Epstein-Barr virus
IFAEVLKDAI

SEQ ID NO: 2235 - protein, 10 aa, Epstein-Barr virus
YFMVFLQTHI

SEQ ID NO: 2236 - protein, 9 aa, Epstein-Barr virus
MVFLQTHIF

SEQ ID NO: 2237 - protein, 9 aa, Epstein-Barr virus
DGVDLPPWF

SEQ ID NO: 2238 - protein, 10 aa, Epstein-Barr virus
EVLKDAIKDL

SEQ ID NO: 2239 - protein, 10 aa, Epstein-Barr virus
ENIAEGLRAL

SEQ ID NO: 2240 - protein, 10 aa, Epstein-Barr virus
DVPPGAIEQG

SEQ ID NO: 2241 - protein, 11 aa, Epstein-Barr virus
RALLARSHVER

SEQ ID NO: 2242 - protein, 10 aa, Epstein-Barr virus
GTALAIPQCR

SEQ ID NO: 2243 - protein, 10 aa, Epstein-Barr virus
QTHIFAEVLK

SEQ ID NO: 2244 - protein, 10 aa, Epstein-Barr virus
DAIKDLVMTK

SEQ ID NO: 2245 - protein, 11 aa, Epstein-Barr virus
MTKPAPTCNIR

SEQ ID NO: 2246 - protein, 9 aa, Epstein-Barr virus
IPQCRLTPL

SEQ ID NO: 2247 - protein, 9 aa, Epstein-Barr virus
GPGPQPGPL

SEQ ID NO: 2248 - protein, 9 aa, Epstein-Barr virus
EPDVPPGAI

SEQ ID NO: 2249 - protein, 10 aa, Epstein-Barr virus
GPGTGPGNGL

SEQ ID NO: 2250 - protein, 10 aa, Epstein-Barr virus
RPPPGRRPFF

SEQ ID NO: 2251 - protein, 8 aa, Epstein-Barr virus
NLRRGTAL

SEQ ID NO: 2252 - protein, 8 aa, Epstein-Barr virus
GPRHRDGV

SEQ ID NO: 2253 - protein, 9 aa, Epstein-Barr virus
VLKDAIKDL

SEQ ID NO: 2254 - protein, 9 aa, Epstein-Barr virus
IPQCRLTPL

SEQ ID NO: 2255 - protein, 9 aa, Epstein-Barr virus
GRRKKGGWF

SEQ ID NO: 2256 - protein, 9 aa, Epstein-Barr virus
PLRESIVCY

SEQ ID NO: 2257 - protein, 10 aa, Epstein-Barr virus
RLTPLSRLPF

SEQ ID NO: 2258 - protein, 9 aa, Epstein-Barr virus
GQGGSNPKF

SEQ ID NO: 2259 - protein, 10 aa, Epstein-Barr virus
PVGEADYFEY

SEQ ID NO: 2260 - protein, 9 aa, Epstein-Barr virus
MVFLQTHIF

SEQ ID NO: 2261 - protein, 8 aa, Epstein-Barr virus
RESIVCYF

SEQ ID NO: 2262 - protein, 8 aa, Epstein-Barr virus
GEADYFEY

SEQ ID NO: 2263 - protein, 8 aa, Epstein-Barr virus
FENIAEGL

SEQ ID NO: 2264 - protein, 8 aa, Epstein-Barr virus
AEGLRALL

SEQ ID NO: 2265 - protein, 9 aa, Epstein-Barr virus
DGVDLPPWF

SEQ ID NO: 2266 - protein, 10 aa, Epstein-Barr virus
RRKKGGWFGK

SEQ ID NO: 2267 - protein, 10 aa, Epstein-Barr virus
GRGGSGGRGR

SEQ ID NO: 2268 - protein, 9 aa, Epstein-Barr virus
GRGGSGGRR

SEQ ID NO: 2269 - protein, 9 aa, Epstein-Barr virus
RRGGDNHGR

SEQ ID NO: 2270 - protein, 9 aa, Epstein-Barr virus
CRLTPLSRL

SEQ ID NO: 2271 - protein, 9 aa, Epstein-Barr virus
HPVGEADYF

SEQ ID NO: 2272 - protein, 9 aa, Epstein-Barr virus
IPQCRLTPL

SEQ ID NO: 2273 - protein, 9 aa, Epstein-Barr virus
GPGPQPGPL

SEQ ID NO: 2274 - protein, 10 aa, Epstein-Barr virus
GPLRESIVCY

SEQ ID NO: 2275 - protein, 10 aa, Epstein-Barr virus
GPGTGPGNGL

SEQ ID NO: 2276 - protein, 9 aa, Epstein-Barr virus
GSNPKFENI

SEQ ID NO: 2277 - protein, 9 aa, Epstein-Barr virus
GSKTSLYNL

SEQ ID NO: 2278 - protein, 9 aa, Epstein-Barr virus
IAEGLRALL

SEQ ID NO: 2279 - protein, 10 aa, Epstein-Barr virus
ESIVCYFMVF

SEQ ID NO: 2280 - protein, 10 aa, Epstein-Barr virus
MTKPAPTCNI

SEQ ID NO: 2281 - protein, 15 aa, Epstein-Barr virus
CYFMVFLQTHIFAEV

SEQ ID NO: 2282 - protein, 15 aa, Epstein-Barr virus
TSLYNLRRGTALAIP

SEQ ID NO: 2283 - protein, 15 aa, Epstein-Barr virus
RLPFGMAPGPGPQPG

SEQ ID NO: 2284 - protein, 15 aa, Epstein-Barr virus
AEGLRALLARSHVER

SEQ ID NO: 2285 - protein, 15 aa, Epstein-Barr virus
AGVFVYGGSKTSLYN

SEQ ID NO: 2286 - protein, 15 aa, Epstein-Barr virus
FAEVLKDAIKDLVMT

SEQ ID NO: 2287 - protein, 15 aa, Epstein-Barr virus
FENIAEGLRALLARS

SEQ ID NO: 2288 - protein, 15 aa, Epstein-Barr virus
QCRLTPLSRLPFGMA

SEQ ID NO: 2289 - protein, 15 aa, Epstein-Barr virus
RPFFHPVGEADYFEY

SEQ ID NO: 2290 - protein, 15 aa, Epstein-Barr virus
GVFVYGGSKTSLYNL

SEQ ID NO: 2291 - protein, 15 aa, Epstein-Barr virus
VCYFMVFLQTHIFAE

SEQ ID NO: 2292 - protein, 15 aa, Epstein-Barr virus
KTSLYNLRRGTALAI

SEQ ID NO: 2293 - protein, 15 aa, Epstein-Barr virus
AGVFVYGGSKTSLYN

SEQ ID NO: 2294 - protein, 15 aa, Epstein-Barr virus
THIFAEVLKDAIKDL

SEQ ID NO: 2295 - protein, 15 aa, Epstein-Barr virus
FENIAEGLRALLARS

SEQ ID NO: 2296 - protein, 15 aa, Epstein-Barr virus
VFVYGGSKTSLYNLR

SEQ ID NO: 2297 - protein, 15 aa, Epstein-Barr virus
RPFFHPVGEADYFEY

SEQ ID NO: 2298 - protein, 15 aa, Epstein-Barr virus
NPKFENIAEGLRALL

SEQ ID NO: 2299 - protein, 15 aa, Epstein-Barr virus
RSHVERTTDEGTWVA

SEQ ID NO: 2300 - protein, 15 aa, Epstein-Barr virus
CYFMVFLQTHIFAEV

SEQ ID NO: 2301 - protein, 15 aa, Epstein-Barr virus
KTSLYNLRRGTALAI

SEQ ID NO: 2302 - protein, 15 aa, Epstein-Barr virus
KGGWFGKHRGQGGSN

SEQ ID NO: 2303 - protein, 15 aa, Epstein-Barr virus
THIFAEVLKDAIKDL

SEQ ID NO: 2304 - protein, 15 aa, Epstein-Barr virus
PPWFPPMVEGAAAEG

SEQ ID NO: 2305 - protein, 15 aa, Epstein-Barr virus
QCRLTPLSRLPFGMA

SEQ ID NO: 2306 - protein, 15 aa, Epstein-Barr virus
RESIVCYFMVFLQTH

SEQ ID NO: 2307 - protein, 15 aa, Epstein-Barr virus
ESIVCYFMVFLQTHI

SEQ ID NO: 2308 - protein, 15 aa, Epstein-Barr virus
VAGVFVYGGSKTSLY

SEQ ID NO: 2309 - protein, 15 aa, Epstein-Barr virus
GVDLPPWFPPMVEGA

SEQ ID NO: 2310 - protein, 15 aa, Epstein-Barr virus
LYNLRRGTALAIPQC

SEQ ID NO: 2311 - protein, 487 aa, Epstein-Barr virus
MPTFYLALHGGQTYHLIVDTDSLGNPSLSVIPSNPYQEQLSDTPLIPLTIFVGENTGVPPPLPPPPPPPPPPPPPPPPPPPPPPPPPPSPPPPPPPPPPPQRRDAWTQEPSPLDRDPLGYDVGHGPLASAMRMLWMANYIVRQSRGDRGLILPQGPQTAPQARLVQPHVPPLRPTAPTILSPLSQPRLTPPQPLMMPPRPTPPTPLPPATLTVPPRPTRPTTLPPTPLLTVLQRPTELQPTPSPPRMHLPVLHVPDQSMHPLTHQSTPNDPDSPEPRSPTVFYNIPPMPLPPSQLPPPAAPAQPPPGVINDQQLHHLPSGPPWWPPICDPPQPSKTQGQSRGQSRGRGRGRGRGRGKGKSRDKQRKPGGPWRPEPNTSSPSMPELSPVLGLHQGQGAGDSPTPGPSNAAPVCRNSHTATPNVSPIHEPESHNSPEAPILFPDDWYPPSIDPADLDESWDYIFETTESPSSDEDYVEGPSKRPRPSIQ

SEQ ID NO: 2312 - protein, 9 aa, Epstein-Barr virus
PLDRDPLGY

SEQ ID NO: 2313 - protein, 10 aa, Epstein-Barr virus
PADLDESWDY

SEQ ID NO: 2314 - protein, 11 aa, Epstein-Barr virus
TTESPSSDEDY

SEQ ID NO: 2315 - protein, 11 aa, Epstein-Barr virus
SPEPRSPTVFY

SEQ ID NO: 2316 - protein, 11 aa, Epstein-Barr virus
PSPLDRDPLGY

SEQ ID NO: 2317 - protein, 9 aa, Epstein-Barr virus
HLIVDTDSL

SEQ ID NO: 2318 - protein, 9 aa, Epstein-Barr virus
SLGNPSLSV

SEQ ID NO: 2319 - protein, 10 aa, Epstein-Barr virus
TLPPTPLLTV

SEQ ID NO: 2320 - protein, 10 aa, Epstein-Barr virus
VINDQQLHHL

SEQ ID NO: 2321 - protein, 10 aa, Epstein-Barr virus
ALHGGQTYHL

SEQ ID NO: 2322 - protein, 9 aa, Epstein-Barr virus
RGRGRGRGK

SEQ ID NO: 2323 - protein, 9 aa, Epstein-Barr virus
PLDRDPLGY

SEQ ID NO: 2324 - protein, 10 aa, Epstein-Barr virus
YLALHGGQTY

SEQ ID NO: 2325 - protein, 10 aa, Epstein-Barr virus
RLTPPQPLMM

SEQ ID NO: 2326 - protein, 10 aa, Epstein-Barr virus
SVIPSNPYQE

SEQ ID NO: 2327 - protein, 9 aa, Epstein-Barr virus
PSNAAPVCR

SEQ ID NO: 2328 - protein, 10 aa, Epstein-Barr virus
WTQEPSPLDR

SEQ ID NO: 2329 - protein, 10 aa, Epstein-Barr virus
PTPLLTVLQR

SEQ ID NO: 2330 - protein, 10 aa, Epstein-Barr virus
LVQPHVPPLR

SEQ ID NO: 2331 - protein, 10 aa, Epstein-Barr virus
MLWMANYIVR

SEQ ID NO: 2332 - protein, 9 aa, Epstein-Barr virus
GYDVGHGPL

SEQ ID NO: 2333 - protein, 9 aa, Epstein-Barr virus
FYNIPPMPL

SEQ ID NO: 2334 - protein, 9 aa, Epstein-Barr virus
NSPEAPILF

SEQ ID NO: 2335 - protein, 9 aa, Epstein-Barr virus
TTLPPTPLL

SEQ ID NO: 2336 - protein, 9 aa, Epstein-Barr virus
TVLQRPTEL

SEQ ID NO: 2337 - protein, 9 aa, Epstein-Barr virus
LVQPHVPPL

SEQ ID NO: 2338 - protein, 9 aa, Epstein-Barr virus
ETTESPSSD

SEQ ID NO: 2339 - protein, 10 aa, Epstein-Barr virus
DTPLIPLTIF

SEQ ID NO: 2340 - protein, 10 aa, Epstein-Barr virus
DTDSLGNPSL

SEQ ID NO: 2341 - protein, 10 aa, Epstein-Barr virus
DVGHGPLASA

SEQ ID NO: 2342 - protein, 11 aa, Epstein-Barr virus
PTILSPLSQPR

SEQ ID NO: 2343 - protein, 9 aa, Epstein-Barr virus
PATLTVPPR

SEQ ID NO: 2344 - protein, 10 aa, Epstein-Barr virus
PTPLLTVLQR

SEQ ID NO: 2345 - protein, 10 aa, Epstein-Barr virus
MLWMANYIVR

SEQ ID NO: 2346 - protein, 10 aa, Epstein-Barr virus
LVQPHVPPLR

SEQ ID NO: 2347 - protein, 9 aa, Epstein-Barr virus
TPSPPRMHL

SEQ ID NO: 2348 - protein, 9 aa, Epstein-Barr virus
PPTPLLTVL

SEQ ID NO: 2349 - protein, 10 aa, Epstein-Barr virus
EPSPLDRDPL

SEQ ID NO: 2350 - protein, 10 aa, Epstein-Barr virus
PPRPTPPTPL

SEQ ID NO: 2351 - protein, 10 aa, Epstein-Barr virus
PPRPTRPTTL

SEQ ID NO: 2352 - protein, 8 aa, Epstein-Barr virus
SPLDRDPL

SEQ ID NO: 2353 - protein, 8 aa, Epstein-Barr virus
SKRPRPSI

SEQ ID NO: 2354 - protein, 9 aa, Epstein-Barr virus
PPRMHLPVL

SEQ ID NO: 2355 - protein, 9 aa, Epstein-Barr virus
SRGDRGLIL

SEQ ID NO: 2356 - protein, 9 aa, Epstein-Barr virus
RGKGKSRDK

SEQ ID NO: 2357 - protein, 9 aa, Epstein-Barr virus
PLDRDPLGY

SEQ ID NO: 2358 - protein, 10 aa, Epstein-Barr virus
YLALHGGQTY

SEQ ID NO: 2359 - protein, 10 aa, Epstein-Barr virus
SLSVIPSNPY

SEQ ID NO: 2360 - protein, 10 aa, Epstein-Barr virus
DLDESWDYIF

SEQ ID NO: 2361 - protein, 10 aa, Epstein-Barr virus
PLPPATLTVP

SEQ ID NO: 2362 - protein, 9 aa, Epstein-Barr virus
PEPRSPTVF

SEQ ID NO: 2363 - protein, 8 aa, Epstein-Barr virus
DESWDYIF

SEQ ID NO: 2364 - protein, 9 aa, Epstein-Barr virus
QEQLSDTPL

SEQ ID NO: 2365 - protein, 9 aa, Epstein-Barr virus
PELSPVLGL

SEQ ID NO: 2366 - protein, 8 aa, Epstein-Barr virus
DEDYVEGP

SEQ ID NO: 2367 - protein, 10 aa, Epstein-Barr virus
GRGKGKSRDK

SEQ ID NO: 2368 - protein, 10 aa, Epstein-Barr virus
PRLTPPQPLM

SEQ ID NO: 2369 - protein, 9 aa, Epstein-Barr virus
QRKPGGPWR

SEQ ID NO: 2370 - protein, 9 aa, Epstein-Barr virus
PRPTPPTPL

SEQ ID NO: 2371 - protein, 9 aa, Epstein-Barr virus
PRPTRPTTL

SEQ ID NO: 2372 - protein, 9 aa, Epstein-Barr virus
EPRSPTVFY

SEQ ID NO: 2373 - protein, 9 aa, Epstein-Barr virus
VPDQSMHPL

SEQ ID NO: 2374 - protein, 10 aa, Epstein-Barr virus
LPPTPLLTVL

SEQ ID NO: 2375 - protein, 10 aa, Epstein-Barr virus
SPPRMHLPVL

SEQ ID NO: 2376 - protein, 10 aa, Epstein-Barr virus
SPLDRDPLGY

SEQ ID NO: 2377 - protein, 9 aa, Epstein-Barr virus
RSPTVFYNI

SEQ ID NO: 2378 - protein, 9 aa, Epstein-Barr virus
NSPEAPILF

SEQ ID NO: 2379 - protein, 9 aa, Epstein-Barr virus
LALHGGQTY

SEQ ID NO: 2380 - protein, 10 aa, Epstein-Barr virus
PSGPPWWPPI

SEQ ID NO: 2381 - protein, 10 aa, Epstein-Barr virus
PSMPELSPVL

SEQ ID NO: 2382 - protein, 15 aa, Epstein-Barr virus
QPHVPPLRPTAPTIL

SEQ ID NO: 2383 - protein, 15 aa, Epstein-Barr virus
SNPYQEQLSDTPLIP

SEQ ID NO: 2384 - protein, 15 aa, Epstein-Barr virus
PTVFYNIPPMPLPPS

SEQ ID NO: 2385 - protein, 15 aa, Epstein-Barr virus
DQQLHHLPSGPPWWP

SEQ ID NO: 2386 - protein, 15 aa, Epstein-Barr virus
RGLILPQGPQTAPQA

SEQ ID NO: 2387 - protein, 15 aa, Epstein-Barr virus
PPGVINDQQLHHLPS

SEQ ID NO: 2388 - protein, 15 aa, Epstein-Barr virus
PTILSPLSQPRLTPP

SEQ ID NO: 2389 - protein, 15 aa, Epstein-Barr virus
TYHLIVDTDSLGNPS

SEQ ID NO: 2390 - protein, 15 aa, Epstein-Barr virus
HLIVDTDSLGNPSLS

SEQ ID NO: 2391 - protein, 15 aa, Epstein-Barr virus
ASAMRMLWMANYIVR

SEQ ID NO: 2392 - protein, 15 aa, Epstein-Barr virus
MPTFYLALHGGQTYH

SEQ ID NO: 2393 - protein, 15 aa, Epstein-Barr virus
GGPWRPEPNTSSPSM

SEQ ID NO: 2394 - protein, 15 aa, Epstein-Barr virus
PTILSPLSQPRLTPP

SEQ ID NO: 2395 - protein, 15 aa, Epstein-Barr virus
PTPLLTVLQRPTELQ

SEQ ID NO: 2396 - protein, 15 aa, Epstein-Barr virus
DQSMHPLTHQSTPND

SEQ ID NO: 2397 - protein, 15 aa, Epstein-Barr virus
NPSLSVIPSNPYQEQ

SEQ ID NO: 2398 - protein, 15 aa, Epstein-Barr virus
PADLDESWDYIFETT

SEQ ID NO: 2399 - protein, 15 aa, Epstein-Barr virus
DYIFETTESPSSDED

SEQ ID NO: 2400 - protein, 15 aa, Epstein-Barr virus
YLALHGGQTYHLIVD

SEQ ID NO: 2401 - protein, 15 aa, Epstein-Barr virus
YHLIVDTDSLGNPSL

SEQ ID NO: 2402 - protein, 15 aa, Epstein-Barr virus
GQTYHLIVDTDSLGN

SEQ ID NO: 2403 - protein, 15 aa, Epstein-Barr virus
TPLLTVLQRPTELQP

SEQ ID NO: 2404 - protein, 15 aa, Epstein-Barr virus
PQPLMMPPRPTPPTP

SEQ ID NO: 2405 - protein, 15 aa, Epstein-Barr virus
DQSMHPLTHQSTPND

SEQ ID NO: 2406 - protein, 15 aa, Epstein-Barr virus
VINDQQLHHLPSGPP

SEQ ID NO: 2407 - protein, 15 aa, Epstein-Barr virus
LIPLTIFVGENTGVP

SEQ ID NO: 2408 - protein, 15 aa, Epstein-Barr virus
YHLIVDTDSLGNPSL

SEQ ID NO: 2409 - protein, 15 aa, Epstein-Barr virus
TIFVGENTGVPPPLP

SEQ ID NO: 2410 - protein, 15 aa, Epstein-Barr virus
MLWMANYIVRQSRGD

SEQ ID NO: 2411 - protein, 15 aa, Epstein-Barr virus
QPRLTPPQPLMMPPR

SEQ ID NO: 2412 - protein, 158 aa, Human papillomavirus
MHQKRTAMFQDPQERPRKLPQLCTELQTTIHDIILECVYCKQQLLRREVYDFAFRDLCIVYRDGNPYAVCDKCLKFYSKISEYRHYCYSLYGTTLEQQYNKPLCDLLIRCINCQKPLCPEEKQRHLDKKQRFHNIRGRWTGRCMSCCRSSRTRRETQL

SEQ ID NO: 2413 - protein, 11 aa, Human papillomavirus
YAVCDKCLKFY

SEQ ID NO: 2414 - protein, 11 aa, Human papillomavirus
SEYRHYCYSLY

SEQ ID NO: 2415 - protein, 11 aa, Human papillomavirus
CKQQLLRREVY

SEQ ID NO: 2416 - protein, 10 aa, Human papillomavirus
IHDIILECVY

SEQ ID NO: 2417 - protein, 10 aa, Human papillomavirus
YSKISEYRHY

SEQ ID NO: 2418 - protein, 10 aa, Human papillomavirus
TIHDIILECV

SEQ ID NO: 2419 - protein, 10 aa, Human papillomavirus
QLCTELQTTI

SEQ ID NO: 2420 - protein, 10 aa, Human papillomavirus
PLCDLLIRCI

SEQ ID NO: 2421 - protein, 9 aa, Human papillomavirus
KLPQLCTEL

SEQ ID NO: 2422 - protein, 9 aa, Human papillomavirus
QLCTELQTT

SEQ ID NO: 2423 - protein, 10 aa, Human papillomavirus
LLIRCINCQK

SEQ ID NO: 2424 - protein, 10 aa, Human papillomavirus
DIILECVYCK

SEQ ID NO: 2425 - protein, 10 aa, Human papillomavirus
CVYCKQQLLR

SEQ ID NO: 2426 - protein, 10 aa, Human papillomavirus
SLYGTTLEQQ

SEQ ID NO: 2427 - protein, 9 aa, Human papillomavirus
IVYRDGNPY

SEQ ID NO: 2428 - protein, 10 aa, Human papillomavirus
CVYCKQQLLR

SEQ ID NO: 2429 - protein, 10 aa, Human papillomavirus
GTTLEQQYNK

SEQ ID NO: 2430 - protein, 10 aa, Human papillomavirus
DIILECVYCK

SEQ ID NO: 2431 - protein, 10 aa, Human papillomavirus
AFRDLCIVYR

SEQ ID NO: 2432 - protein, 10 aa, Human papillomavirus
WTGRCMSCCR

SEQ ID NO: 2433 - protein, 10 aa, Human papillomavirus
QYNKPLCDLL

SEQ ID NO: 2434 - protein, 10 aa, Human papillomavirus
QDPQERPRKL

SEQ ID NO: 2435 - protein, 10 aa, Human papillomavirus
LCPEEKQRHL

SEQ ID NO: 2436 - protein, 9 aa, Human papillomavirus
VYDFAFRDL

SEQ ID NO: 2437 - protein, 9 aa, Human papillomavirus
PYAVCDKCL

SEQ ID NO: 2438 - protein, 10 aa, Human papillomavirus
EVYDFAFRDL

SEQ ID NO: 2439 - protein, 10 aa, Human papillomavirus
AVCDKCLKFY

SEQ ID NO: 2440 - protein, 10 aa, Human papillomavirus
EYRHYCYSLY

SEQ ID NO: 2441 - protein, 10 aa, Human papillomavirus
DIILECVYCK

SEQ ID NO: 2442 - protein, 10 aa, Human papillomavirus
CIVYRDGNPY

SEQ ID NO: 2443 - protein, 11 aa, Human papillomavirus
FAFRDLCIVYR

SEQ ID NO: 2444 - protein, 11 aa, Human papillomavirus
RTAMFQDPQER

SEQ ID NO: 2445 - protein, 11 aa, Human papillomavirus
CVYCKQQLLRR

SEQ ID NO: 2446 - protein, 11 aa, Human papillomavirus
MSCCRSSRTRR

SEQ ID NO: 2447 - protein, 11 aa, Human papillomavirus
DLLIRCINCQK

SEQ ID NO: 2448 - protein, 10 aa, Human papillomavirus
RPRKLPQLCT

SEQ ID NO: 2449 - protein, 10 aa, Human papillomavirus
NPYAVCDKCL

SEQ ID NO: 2450 - protein, 10 aa, Human papillomavirus
LPQLCTELQT

SEQ ID NO: 2451 - protein, 10 aa, Human papillomavirus
QERPRKLPQL

SEQ ID NO: 2452 - protein, 9 aa, Human papillomavirus
DPQERPRKL

SEQ ID NO: 2453 - protein, 9 aa, Human papillomavirus
CPEEKQRHL

SEQ ID NO: 2454 - protein, 9 aa, Human papillomavirus
DPQERPRKL

SEQ ID NO: 2455 - protein, 9 aa, Human papillomavirus
DKKQRFHNI

SEQ ID NO: 2456 - protein, 9 aa, Human papillomavirus
ERPRKLPQL

SEQ ID NO: 2457 - protein, 9 aa, Human papillomavirus
CVYCKQQLL

SEQ ID NO: 2458 - protein, 10 aa, Human papillomavirus
KQQLLRREVY

SEQ ID NO: 2459 - protein, 10 aa, Human papillomavirus
AVCDKCLKFY

SEQ ID NO: 2460 - protein, 10 aa, Human papillomavirus
QLLRREVYDF

SEQ ID NO: 2461 - protein, 10 aa, Human papillomavirus
QLCTELQTTI

SEQ ID NO: 2462 - protein, 10 aa, Human papillomavirus
FAFRDLCIVY

SEQ ID NO: 2463 - protein, 9 aa, Human papillomavirus
LEQQYNKPL

SEQ ID NO: 2464 - protein, 9 aa, Human papillomavirus
QQLLRREVY

SEQ ID NO: 2465 - protein, 9 aa, Human papillomavirus
DPQERPRKL

SEQ ID NO: 2466 - protein, 9 aa, Human papillomavirus
AFRDLCIVY

SEQ ID NO: 2467 - protein, 8 aa, Human papillomavirus
REVYDFAF

SEQ ID NO: 2468 - protein, 10 aa, Human papillomavirus
RREVYDFAFR

SEQ ID NO: 2469 - protein, 10 aa, Human papillomavirus
QRHLDKKQRF

SEQ ID NO: 2470 - protein, 10 aa, Human papillomavirus
IRCINCQKPL

SEQ ID NO: 2471 - protein, 10 aa, Human papillomavirus
LRREVYDFAF

SEQ ID NO: 2472 - protein, 10 aa, Human papillomavirus
RKLPQLCTEL

SEQ ID NO: 2473 - protein, 10 aa, Human papillomavirus
NPYAVCDKCL

SEQ ID NO: 2474 - protein, 10 aa, Human papillomavirus
FAFRDLCIVY

SEQ ID NO: 2475 - protein, 10 aa, Human papillomavirus
LQTTIHDIIL

SEQ ID NO: 2476 - protein, 10 aa, Human papillomavirus
KPLCDLLIRC

SEQ ID NO: 2477 - protein, 10 aa, Human papillomavirus
ECVYCKQQLL

SEQ ID NO: 2478 - protein, 10 aa, Human papillomavirus
YSKISEYRHY

SEQ ID NO: 2479 - protein, 10 aa, Human papillomavirus
EVYDFAFRDL

SEQ ID NO: 2480 - protein, 10 aa, Human papillomavirus
SSRTRRETQL

SEQ ID NO: 2481 - protein, 10 aa, Human papillomavirus
FAFRDLCIVY

SEQ ID NO: 2482 - protein, 10 aa, Human papillomavirus
YAVCDKCLKF

SEQ ID NO: 2483 - protein, 15 aa, Human papillomavirus
IRCINCQKPLCPEEK

SEQ ID NO: 2484 - protein, 15 aa, Human papillomavirus
CIVYRDGNPYAVCDK

SEQ ID NO: 2485 - protein, 15 aa, Human papillomavirus
RHYCYSLYGTTLEQQ

SEQ ID NO: 2486 - protein, 15 aa, Human papillomavirus
NKPLCDLLIRCINCQ

SEQ ID NO: 2487 - protein, 15 aa, Human papillomavirus
DLLIRCINCQKPLCP

SEQ ID NO: 2488 - protein, 15 aa, Human papillomavirus
RTAMFQDPQERPRKL

SEQ ID NO: 2489 - protein, 15 aa, Human papillomavirus
LCIVYRDGNPYAVCD

SEQ ID NO: 2490 - protein, 15 aa, Human papillomavirus
EKQRHLDKKQRFHNI

SEQ ID NO: 2491 - protein, 15 aa, Human papillomavirus
GTTLEQQYNKPLCDL

SEQ ID NO: 2492 - protein, 15 aa, Human papillomavirus
NPYAVCDKCLKFYSK

SEQ ID NO: 2493 - protein, 15 aa, Human papillomavirus
PRKLPQLCTELQTTI

SEQ ID NO: 2494 - protein, 15 aa, Human papillomavirus
LPQLCTELQTTIHDI

SEQ ID NO: 2495 - protein, 15 aa, Human papillomavirus
FRDLCIVYRDGNPYA

SEQ ID NO: 2496 - protein, 15 aa, Human papillomavirus
LCIVYRDGNPYAVCD

SEQ ID NO: 2497 - protein, 15 aa, Human papillomavirus
REVYDFAFRDLCIVY

SEQ ID NO: 2498 - protein, 15 aa, Human papillomavirus
YSLYGTTLEQQYNKP

SEQ ID NO: 2499 - protein, 15 aa, Human papillomavirus
CTELQTTIHDIILEC

SEQ ID NO: 2500 - protein, 15 aa, Human papillomavirus
QTTIHDIILECVYCK

SEQ ID NO: 2501 - protein, 15 aa, Human papillomavirus
LKFYSKISEYRHYCY

SEQ ID NO: 2502 - protein, 15 aa, Human papillomavirus
GTTLEQQYNKPLCDL

SEQ ID NO: 2503 - protein, 15 aa, Human papillomavirus
FRDLCIVYRDGNPYA

SEQ ID NO: 2504 - protein, 15 aa, Human papillomavirus
GNPYAVCDKCLKFYS

SEQ ID NO: 2505 - protein, 15 aa, Human papillomavirus
REVYDFAFRDLCIVY

SEQ ID NO: 2506 - protein, 15 aa, Human papillomavirus
DLLIRCINCQKPLCP

SEQ ID NO: 2507 - protein, 15 aa, Human papillomavirus
LKFYSKISEYRHYCY

SEQ ID NO: 2508 - protein, 15 aa, Human papillomavirus
DKCLKFYSKISEYRH

SEQ ID NO: 2509 - protein, 15 aa, Human papillomavirus
RREVYDFAFRDLCIV

SEQ ID NO: 2510 - protein, 15 aa, Human papillomavirus
IRCINCQKPLCPEEK

SEQ ID NO: 2511 - protein, 15 aa, Human papillomavirus
LDKKQRFHNIRGRWT

SEQ ID NO: 2512 - protein, 15 aa, Human papillomavirus
LECVYCKQQLLRREV

SEQ ID NO: 2513 - protein, 98 aa, Human papillomavirus
MHGDTPTLHEYMLDLQPETTDLYCYEQLNDSSEEEDEIDGPAGQAEPDRAHYNIVTFCCKCDSTLRLCVQSTHVDIRTLEDLLMGTLGIVCPICSQKP

SEQ ID NO: 2514 - protein, 11 aa, Human papillomavirus
MHGDTPTLHEY

SEQ ID NO: 2515 - protein, 10 aa, Human papillomavirus
HGDTPTLHEY

SEQ ID NO: 2516 - protein, 10 aa, Human papillomavirus
QPETTDLYCY

SEQ ID NO: 2517 - protein, 10 aa, Human papillomavirus
DLQPETTDLY

SEQ ID NO: 2518 - protein, 9 aa, Human papillomavirus
QAEPDRAHY

SEQ ID NO: 2519 - protein, 10 aa, Human papillomavirus
DLLMGTLGIV

SEQ ID NO: 2520 - protein, 10 aa, Human papillomavirus
TLEDLLMGTL

SEQ ID NO: 2521 - protein, 9 aa, Human papillomavirus
LLMGTLGIV

SEQ ID NO: 2522 - protein, 9 aa, Human papillomavirus
TLHEYMLDL

SEQ ID NO: 2523 - protein, 9 aa, Human papillomavirus
DLQPETTDL

SEQ ID NO: 2524 - protein, 10 aa, Human papillomavirus
TLRLCVQSTH

SEQ ID NO: 2525 - protein, 10 aa, Human papillomavirus
GIVCPICSQK

SEQ ID NO: 2526 - protein, 10 aa, Human papillomavirus
DLQPETTDLY

SEQ ID NO: 2527 - protein, 10 aa, Human papillomavirus
LLMGTLGIVC

SEQ ID NO: 2528 - protein, 9 aa, Human papillomavirus
IVCPICSQK

SEQ ID NO: 2529 - protein, 10 aa, Human papillomavirus
CVQSTHVDIR

SEQ ID NO: 2530 - protein, 10 aa, Human papillomavirus
GIVCPICSQK

SEQ ID NO: 2531 - protein, 10 aa, Human papillomavirus
SSEEEDEIDG

SEQ ID NO: 2532 - protein, 9 aa, Human papillomavirus
IVCPICSQK

SEQ ID NO: 2533 - protein, 9 aa, Human papillomavirus
STLRLCVQS

SEQ ID NO: 2534 - protein, 10 aa, Human papillomavirus
TFCCKCDSTL

SEQ ID NO: 2535 - protein, 10 aa, Human papillomavirus
VDIRTLEDLL

SEQ ID NO: 2536 - protein, 10 aa, Human papillomavirus
AEPDRAHYNI

SEQ ID NO: 2537 - protein, 9 aa, Human papillomavirus
TDLYCYEQL

SEQ ID NO: 2538 - protein, 9 aa, Human papillomavirus
GTLGIVCPI

SEQ ID NO: 2539 - protein, 10 aa, Human papillomavirus
DTPTLHEYML

SEQ ID NO: 2540 - protein, 10 aa, Human papillomavirus
HVDIRTLEDL

SEQ ID NO: 2541 - protein, 10 aa, Human papillomavirus
DRAHYNIVTF

SEQ ID NO: 2542 - protein, 9 aa, Human papillomavirus
STHVDIRTL

SEQ ID NO: 2543 - protein, 9 aa, Human papillomavirus
ETTDLYCYE

SEQ ID NO: 2544 - protein, 11 aa, Human papillomavirus
TFCCKCDSTLR

SEQ ID NO: 2545 - protein, 11 aa, Human papillomavirus
ETTDLYCYEQL

SEQ ID NO: 2546 - protein, 10 aa, Human papillomavirus
CVQSTHVDIR

SEQ ID NO: 2547 - protein, 9 aa, Human papillomavirus
IVCPICSQK

SEQ ID NO: 2548 - protein, 9 aa, Human papillomavirus
PAGQAEPDR

SEQ ID NO: 2549 - protein, 10 aa, Human papillomavirus
EPDRAHYNIV

SEQ ID NO: 2550 - protein, 10 aa, Human papillomavirus
GPAGQAEPDR

SEQ ID NO: 2551 - protein, 10 aa, Human papillomavirus
CCKCDSTLRL

SEQ ID NO: 2552 - protein, 9 aa, Human papillomavirus
TPTLHEYML

SEQ ID NO: 2553 - protein, 9 aa, Human papillomavirus
EIDGPAGQA

SEQ ID NO: 2554 - protein, 9 aa, Human papillomavirus
DIRTLEDLL

SEQ ID NO: 2555 - protein, 9 aa, Human papillomavirus
TLHEYMLDL

SEQ ID NO: 2556 - protein, 9 aa, Human papillomavirus
TPTLHEYML

SEQ ID NO: 2557 - protein, 9 aa, Human papillomavirus
DLQPETTDL

SEQ ID NO: 2558 - protein, 8 aa, Human papillomavirus
CCKCDSTL

SEQ ID NO: 2559 - protein, 10 aa, Human papillomavirus
DLQPETTDLY

SEQ ID NO: 2560 - protein, 10 aa, Human papillomavirus
GQAEPDRAHY

SEQ ID NO: 2561 - protein, 10 aa, Human papillomavirus
TLRLCVQSTH

SEQ ID NO: 2562 - protein, 10 aa, Human papillomavirus
LLMGTLGIVC

SEQ ID NO: 2563 - protein, 9 aa, Human papillomavirus
LQPETTDLY

SEQ ID NO: 2564 - protein, 9 aa, Human papillomavirus
LEDLLMGTL

SEQ ID NO: 2565 - protein, 9 aa, Human papillomavirus
PETTDLYCY

SEQ ID NO: 2566 - protein, 9 aa, Human papillomavirus
DEIDGPAGQ

SEQ ID NO: 2567 - protein, 9 aa, Human papillomavirus
DIRTLEDLL

SEQ ID NO: 2568 - protein, 8 aa, Human papillomavirus
AEPDRAHY

SEQ ID NO: 2569 - protein, 10 aa, Human papillomavirus
DRAHYNIVTF

SEQ ID NO: 2570 - protein, 10 aa, Human papillomavirus
LDLQPETTDL

SEQ ID NO: 2571 - protein, 9 aa, Human papillomavirus
LRLCVQSTH

SEQ ID NO: 2572 - protein, 9 aa, Human papillomavirus
IRTLEDLLM

SEQ ID NO: 2573 - protein, 9 aa, Human papillomavirus
RAHYNIVTF

SEQ ID NO: 2574 - protein, 10 aa, Human papillomavirus
QPETTDLYCY

SEQ ID NO: 2575 - protein, 9 aa, Human papillomavirus
TPTLHEYML

SEQ ID NO: 2576 - protein, 9 aa, Human papillomavirus
EPDRAHYNI

SEQ ID NO: 2577 - protein, 9 aa, Human papillomavirus
FCCKCDSTL

SEQ ID NO: 2578 - protein, 9 aa, Human papillomavirus
LEDLLMGTL

SEQ ID NO: 2579 - protein, 10 aa, Human papillomavirus
QSTHVDIRTL

SEQ ID NO: 2580 - protein, 9 aa, Human papillomavirus
RAHYNIVTF

SEQ ID NO: 2581 - protein, 9 aa, Human papillomavirus
DSSEEEDEI

SEQ ID NO: 2582 - protein, 9 aa, Human papillomavirus
GTLGIVCPI

SEQ ID NO: 2583 - protein, 9 aa, Human papillomavirus
DTPTLHEYM

SEQ ID NO: 2584 - protein, 15 aa, Human papillomavirus
MGTLGIVCPICSQKP

SEQ ID NO: 2585 - protein, 15 aa, Human papillomavirus
HVDIRTLEDLLMGTL

SEQ ID NO: 2586 - protein, 15 aa, Human papillomavirus
DLLMGTLGIVCPICS

SEQ ID NO: 2587 - protein, 15 aa, Human papillomavirus
IRTLEDLLMGTLGIV

SEQ ID NO: 2588 - protein, 15 aa, Human papillomavirus
TLEDLLMGTLGIVCP

SEQ ID NO: 2589 - protein, 15 aa, Human papillomavirus
TFCCKCDSTLRLCVQ

SEQ ID NO: 2590 - protein, 15 aa, Human papillomavirus
MLDLQPETTDLYCYE

SEQ ID NO: 2591 - protein, 15 aa, Human papillomavirus
TTDLYCYEQLNDSSE

SEQ ID NO: 2592 - protein, 15 aa, Human papillomavirus
IRTLEDLLMGTLGIV

SEQ ID NO: 2593 - protein, 15 aa, Human papillomavirus
LHEYMLDLQPETTDL

SEQ ID NO: 2594 - protein, 15 aa, Human papillomavirus
LHEYMLDLQPETTDL

SEQ ID NO: 2595 - protein, 15 aa, Human papillomavirus
TDLYCYEQLNDSSEE

SEQ ID NO: 2596 - protein, 15 aa, Human papillomavirus
RAHYNIVTFCCKCDS

SEQ ID NO: 2597 - protein, 15 aa, Human papillomavirus
HEYMLDLQPETTDLY

SEQ ID NO: 2598 - protein, 15 aa, Human papillomavirus
MLDLQPETTDLYCYE

SEQ ID NO: 2599 - protein, 15 aa, Human papillomavirus
IVTFCCKCDSTLRLC

SEQ ID NO: 2600 - protein, 15 aa, Human papillomavirus
MLDLQPETTDLYCYE

SEQ ID NO: 2601 - protein, 15 aa, Human papillomavirus
THVDIRTLEDLLMGT

SEQ ID NO: 2602 - protein, 15 aa, Human papillomavirus
HVDIRTLEDLLMGTL

SEQ ID NO: 2603 - protein, 15 aa, Human papillomavirus
YEQLNDSSEEEDEID

SEQ ID NO: 2604 - protein, 15 aa, Human papillomavirus
YNIVTFCCKCDSTLR

SEQ ID NO: 2605 - protein, 15 aa, Human papillomavirus
DLLMGTLGIVCPICS

SEQ ID NO: 2606 - protein, 15 aa, Human papillomavirus
MGTLGIVCPICSQKP

SEQ ID NO: 2607 - protein, 15 aa, Human papillomavirus
TDLYCYEQLNDSSEE

SEQ ID NO: 2608 - protein, 15 aa, Human papillomavirus
LYCYEQLNDSSEEED

SEQ ID NO: 2609 - protein, 15 aa, Human papillomavirus
TTDLYCYEQLNDSSE

SEQ ID NO: 2610 - protein, 15 aa, Human papillomavirus
TPTLHEYMLDLQPET

SEQ ID NO: 2611 - protein, 15 aa, Human papillomavirus
EDLLMGTLGIVCPIC

SEQ ID NO: 2612 - protein, 15 aa, Human papillomavirus
MGTLGIVCPICSQKP

SEQ ID NO: 2613 - protein, 15 aa, Human papillomavirus
HYNIVTFCCKCDSTL

SEQ ID NO: 2614 - protein, 561 aa, Human cytomegalovirus
MESRGRRCPEMISVLGPISGHVLKAVFSRGDTPVLPHETRLLQTGIHVRVSQPSLILVSQYTPDSTPCHRGDNQLQVQHTYFTGSEVENVSVNVHNPTGRSICPSQEPMSIYVYALPLKMLNIPSINVHHYPSAAERKHRHLPVADAVIHASGKQMWQARLTVSGLAWTRQQNQWKEPDVYYTSAFVFPTKDVALRHVVCAHELVCSMENTRATKMQVIGDQYVKVYLESFCEDVPSGKLFMHVTLGSDVEEDLTMTRNPQPFMRPHERNGFTVLCPKNMIIKPGKISHIMLDVAFTSHEHFGLLCPKSIPGLSISGNLLMNGQQIFLEVQAIRETVELRQYDPVAALFFFDIDLLLQRGPQYSEHPTFTSQYRIQGKLEYRHTWDRHDEGAAQGDDDVWTSGSDSDEELVTTERKTPRVTGGGAMAGASTSAGRKRKSASSATACTSGVMTRGRLKAESTVAPEEDTDEDSDNEIHNPAVFTWPPWQAGILARNLVPMVATVQGQNLKYQEFFWDANDIYRIFAELEGVWQPAAQPKRRRHRQDALPGPCIASTPKKHRG

SEQ ID NO: 2615 - protein, 11 aa, Human cytomegalovirus
YSEHPTFTSQY

SEQ ID NO: 2616 - protein, 11 aa, Human cytomegalovirus
ATKMQVIGDQY

SEQ ID NO: 2617 - protein, 11 aa, Human cytomegalovirus
SQYRIQGKLEY

SEQ ID NO: 2618 - protein, 11 aa, Human cytomegalovirus
PSQEPMSIYVY

SEQ ID NO: 2619 - protein, 10 aa, Human cytomegalovirus
ATVQGQNLKY

SEQ ID NO: 2620 - protein, 10 aa, Human cytomegalovirus
LLCPKSIPGL

SEQ ID NO: 2621 - protein, 10 aa, Human cytomegalovirus
ILARNLVPMV

SEQ ID NO: 2622 - protein, 10 aa, Human cytomegalovirus
ALFFFDIDLL

SEQ ID NO: 2623 - protein, 10 aa, Human cytomegalovirus
ALPGPCIAST

SEQ ID NO: 2624 - protein, 10 aa, Human cytomegalovirus
VLGPISGHVL

SEQ ID NO: 2625 - protein, 10 aa, Human cytomegalovirus
DVYYTSAFVF

SEQ ID NO: 2626 - protein, 10 aa, Human cytomegalovirus
DLLLQRGPQY

SEQ ID NO: 2627 - protein, 10 aa, Human cytomegalovirus
RLLQTGIHVR

SEQ ID NO: 2628 - protein, 10 aa, Human cytomegalovirus
SIYVYALPLK

SEQ ID NO: 2629 - protein, 10 aa, Human cytomegalovirus
VLCPKNMIIK

SEQ ID NO: 2630 - protein, 10 aa, Human cytomegalovirus
ASTSAGRKRK

SEQ ID NO: 2631 - protein, 10 aa, Human cytomegalovirus
GVWQPAAQPK

SEQ ID NO: 2632 - protein, 10 aa, Human cytomegalovirus
SVNVHNPTGR

SEQ ID NO: 2633 - protein, 10 aa, Human cytomegalovirus
SIYVYALPLK

SEQ ID NO: 2634 - protein, 10 aa, Human cytomegalovirus
YTSAFVFPTK

SEQ ID NO: 2635 - protein, 10 aa, Human cytomegalovirus
QYVKVYLESF

SEQ ID NO: 2636 - protein, 10 aa, Human cytomegalovirus
QYDPVAALFF

SEQ ID NO: 2637 - protein, 9 aa, Human cytomegalovirus
VFPTKDVAL

SEQ ID NO: 2638 - protein, 9 aa, Human cytomegalovirus
VYYTSAFVF

SEQ ID NO: 2639 - protein, 9 aa, Human cytomegalovirus
VYALPLKML

SEQ ID NO: 2640 - protein, 10 aa, Human cytomegalovirus
DVYYTSAFVF

SEQ ID NO: 2641 - protein, 10 aa, Human cytomegalovirus
DVAFTSHEHF

SEQ ID NO: 2642 - protein, 10 aa, Human cytomegalovirus
EVENVSVNVH

SEQ ID NO: 2643 - protein, 10 aa, Human cytomegalovirus
EPMSIYVYAL

SEQ ID NO: 2644 - protein, 10 aa, Human cytomegalovirus
FVFPTKDVAL

SEQ ID NO: 2645 - protein, 11 aa, Human cytomegalovirus
ELVTTERKTPR

SEQ ID NO: 2646 - protein, 11 aa, Human cytomegalovirus
NVHHYPSAAER

SEQ ID NO: 2647 - protein, 11 aa, Human cytomegalovirus
FVFPTKDVALR

SEQ ID NO: 2648 - protein, 11 aa, Human cytomegalovirus
TVLCPKNMIIK

SEQ ID NO: 2649 - protein, 11 aa, Human cytomegalovirus
DSDEELVTTER

SEQ ID NO: 2650 - protein, 10 aa, Human cytomegalovirus
EPMSIYVYAL

SEQ ID NO: 2651 - protein, 10 aa, Human cytomegalovirus
KPGKISHIML

SEQ ID NO: 2652 - protein, 10 aa, Human cytomegalovirus
IPGLSISGNL

SEQ ID NO: 2653 - protein, 10 aa, Human cytomegalovirus
TPVLPHETRL

SEQ ID NO: 2654 - protein, 10 aa, Human cytomegalovirus
VPSGKLFMHV

SEQ ID NO: 2655 - protein, 9 aa, Human cytomegalovirus
RRRHRQDAL

SEQ ID NO: 2656 - protein, 9 aa, Human cytomegalovirus
AAERKHRHL

SEQ ID NO: 2657 - protein, 9 aa, Human cytomegalovirus
VLCPKNMII

SEQ ID NO: 2658 - protein, 9 aa, Human cytomegalovirus
QPKRRRHRQ

SEQ ID NO: 2659 - protein, 9 aa, Human cytomegalovirus
ALPLKMLNI

SEQ ID NO: 2660 - protein, 10 aa, Human cytomegalovirus
NQWKEPDVYY

SEQ ID NO: 2661 - protein, 10 aa, Human cytomegalovirus
RQYDPVAALF

SEQ ID NO: 2662 - protein, 10 aa, Human cytomegalovirus
SQEPMSIYVY

SEQ ID NO: 2663 - protein, 10 aa, Human cytomegalovirus
NQLQVQHTYF

SEQ ID NO: 2664 - protein, 10 aa, Human cytomegalovirus
NLLMNGQQIF

SEQ ID NO: 2665 - protein, 9 aa, Human cytomegalovirus
NEIHNPAVF

SEQ ID NO: 2666 - protein, 9 aa, Human cytomegalovirus
QEPMSIYVY

SEQ ID NO: 2667 - protein, 8 aa, Human cytomegalovirus
AERKHRHL

SEQ ID NO: 2668 - protein, 8 aa, Human cytomegalovirus
DPVAALFF

SEQ ID NO: 2669 - protein, 8 aa, Human cytomegalovirus
DEELVTTE

SEQ ID NO: 2670 - protein, 10 aa, Human cytomegalovirus
RRCPEMISVL

SEQ ID NO: 2671 - protein, 10 aa, Human cytomegalovirus
YRIQGKLEYR

SEQ ID NO: 2672 - protein, 10 aa, Human cytomegalovirus
KRRRHRQDAL

SEQ ID NO: 2673 - protein, 10 aa, Human cytomegalovirus
VRVSQPSLIL

SEQ ID NO: 2674 - protein, 10 aa, Human cytomegalovirus
RLLQTGIHVR

SEQ ID NO: 2675 - protein, 9 aa, Human cytomegalovirus
DPVAALFFF

SEQ ID NO: 2676 - protein, 9 aa, Human cytomegalovirus
WPPWQAGIL

SEQ ID NO: 2677 - protein, 9 aa, Human cytomegalovirus
IPSINVHHY

SEQ ID NO: 2678 - protein, 9 aa, Human cytomegalovirus
KPGKISHIM

SEQ ID NO: 2679 - protein, 9 aa, Human cytomegalovirus
CPSQEPMSI

SEQ ID NO: 2680 - protein, 10 aa, Human cytomegalovirus
RSICPSQEPM

SEQ ID NO: 2681 - protein, 10 aa, Human cytomegalovirus
PVLPHETRLL

SEQ ID NO: 2682 - protein, 10 aa, Human cytomegalovirus
SAAERKHRHL

SEQ ID NO: 2683 - protein, 10 aa, Human cytomegalovirus
MSIYVYALPL

SEQ ID NO: 2684 - protein, 10 aa, Human cytomegalovirus
GSDVEEDLTM

SEQ ID NO: 2685 - protein, 15 aa, Human cytomegalovirus
RNGFTVLCPKNMIIK

SEQ ID NO: 2686 - protein, 15 aa, Human cytomegalovirus
HEHFGLLCPKSIPGL

SEQ ID NO: 2687 - protein, 15 aa, Human cytomegalovirus
LRQYDPVAALFFFDI

SEQ ID NO: 2688 - protein, 15 aa, Human cytomegalovirus
CPEMISVLGPISGHV

SEQ ID NO: 2689 - protein, 15 aa, Human cytomegalovirus
ISVLGPISGHVLKAV

SEQ ID NO: 2690 - protein, 15 aa, Human cytomegalovirus
HVTLGSDVEEDLTMT

SEQ ID NO: 2691 - protein, 15 aa, Human cytomegalovirus
YQEFFWDANDIYRIF

SEQ ID NO: 2692 - protein, 15 aa, Human cytomegalovirus
SGNLLMNGQQIFLEV

SEQ ID NO: 2693 - protein, 15 aa, Human cytomegalovirus
QPFMRPHERNGFTVL

SEQ ID NO: 2694 - protein, 15 aa, Human cytomegalovirus
AALFFFDIDLLLQRG

SEQ ID NO: 2695 - protein, 15 aa, Human cytomegalovirus
TPVLPHETRLLQTGI

SEQ ID NO: 2696 - protein, 15 aa, Human cytomegalovirus
PLKMLNIPSINVHHY

SEQ ID NO: 2697 - protein, 15 aa, Human cytomegalovirus
FAELEGVWQPAAQPK

SEQ ID NO: 2698 - protein, 15 aa, Human cytomegalovirus
KAVFSRGDTPVLPHE

SEQ ID NO: 2699 - protein, 15 aa, Human cytomegalovirus
VSQYTPDSTPCHRGD

SEQ ID NO: 2700 - protein, 15 aa, Human cytomegalovirus
PLKMLNIPSINVHHY

SEQ ID NO: 2701 - protein, 15 aa, Human cytomegalovirus
SAFVFPTKDVALRHV

SEQ ID NO: 2702 - protein, 15 aa, Human cytomegalovirus
ATKMQVIGDQYVKVY

SEQ ID NO: 2703 - protein, 15 aa, Human cytomegalovirus
IPGLSISGNLLMNGQ

SEQ ID NO: 2704 - protein, 15 aa, Human cytomegalovirus
KAVFSRGDTPVLPHE

SEQ ID NO: 2705 - protein, 15 aa, Human cytomegalovirus
HPTFTSQYRIQGKLE

SEQ ID NO: 2706 - protein, 15 aa, Human cytomegalovirus
TSAFVFPTKDVALRH

SEQ ID NO: 2707 - protein, 15 aa, Human cytomegalovirus
TSGVMTRGRLKAEST

SEQ ID NO: 2708 - protein, 15 aa, Human cytomegalovirus
NIPSINVHHYPSAAE

SEQ ID NO: 2709 - protein, 15 aa, Human cytomegalovirus
LPVADAVIHASGKQM

SEQ ID NO: 2710 - protein, 15 aa, Human cytomegalovirus
TVELRQYDPVAALFF

SEQ ID NO: 2711 - protein, 15 aa, Human cytomegalovirus
LILVSQYTPDSTPCH

SEQ ID NO: 2712 - protein, 15 aa, Human cytomegalovirus
NPAVFTWPPWQAGIL

SEQ ID NO: 2713 - protein, 15 aa, Human cytomegalovirus
PEMISVLGPISGHVL

SEQ ID NO: 2714 - protein, 15 aa, Human cytomegalovirus
QEPMSIYVYALPLKM

SEQ ID NO: 2715 - protein, 491 aa, Human cytomegalovirus
MESSAKRKMDPDNPDEGPSSKVPRPETPVTKATTFLQTMLRKEVNSQLSLGDPLFPELAEESLKTFERVTEDCNENPEKDVLAELVKQIKVRVDMVRHRIKEHMLKKYTQTEEKFTGAFNMMGGCLQNALDILDKVHEPFEEMKCIGLTMQSMYENYIVPEDKREMWMACIKELHDVSKGAANKLGGALQAKARAKKDELRRKMMYMCYRNIEFFTKNSAFPKTTNGCSQAMAALQNLPQCSPDEIMAYAQKIFKILDEERDKVLTHIDHIFMDILTTCVETMCNEYKVTSDACMMTMYGGISLLSEFCRVLSCYVLEETSVMLAKRPLITKPEVISVMKRRIEEICMKVFAQYILGADPLRVCSPSVDDLRAIAEESDEEEAIVAYTLATRGASSSDSLVSPPESPVPATIPLSSVIVAENSDQEESEQSDEEEEEGAQEEREDTVSVKSEPVSEIEEVAPEEEEDGAEEPTASGGKSTHPMVTRSKADQ

SEQ ID NO: 2716 - protein, 11 aa, Human cytomegalovirus
LSEFCRVLSCY

SEQ ID NO: 2717 - protein, 11 aa, Human cytomegalovirus
ESDEEEAIVAY

SEQ ID NO: 2718 - protein, 11 aa, Human cytomegalovirus
KKDELRRKMMY

SEQ ID NO: 2719 - protein, 10 aa, Human cytomegalovirus
TSDACMMTMY

SEQ ID NO: 2720 - protein, 9 aa, Human cytomegalovirus
IKEHMLKKY

SEQ ID NO: 2721 - protein, 10 aa, Human cytomegalovirus
SLGDPLFPEL

SEQ ID NO: 2722 - protein, 10 aa, Human cytomegalovirus
LITKPEVISV

SEQ ID NO: 2723 - protein, 9 aa, Human cytomegalovirus
VLAELVKQI

SEQ ID NO: 2724 - protein, 9 aa, Human cytomegalovirus
TMYGGISLL

SEQ ID NO: 2725 - protein, 9 aa, Human cytomegalovirus
ILDEERDKV

SEQ ID NO: 2726 - protein, 10 aa, Human cytomegalovirus
ALQAKARAKK

SEQ ID NO: 2727 - protein, 10 aa, Human cytomegalovirus
CIKELHDVSK

SEQ ID NO: 2728 - protein, 9 aa, Human cytomegalovirus
DVSKGAANK

SEQ ID NO: 2729 - protein, 9 aa, Human cytomegalovirus
RIKEHMLKK

SEQ ID NO: 2730 - protein, 9 aa, Human cytomegalovirus
KLGGALQAK

SEQ ID NO: 2731 - protein, 10 aa, Human cytomegalovirus
TTFLQTMLRK

SEQ ID NO: 2732 - protein, 10 aa, Human cytomegalovirus
STHPMVTRSK

SEQ ID NO: 2733 - protein, 10 aa, Human cytomegalovirus
ATTFLQTMLR

SEQ ID NO: 2734 - protein, 10 aa, Human cytomegalovirus
IMAYAQKIFK

SEQ ID NO: 2735 - protein, 9 aa, Human cytomegalovirus
KSTHPMVTR

SEQ ID NO: 2736 - protein, 10 aa, Human cytomegalovirus
LFPELAEESL

SEQ ID NO: 2737 - protein, 10 aa, Human cytomegalovirus
MYMCYRNIEF

SEQ ID NO: 2738 - protein, 9 aa, Human cytomegalovirus
AYAQKIFKI

SEQ ID NO: 2739 - protein, 9 aa, Human cytomegalovirus
KYTQTEEKF

SEQ ID NO: 2740 - protein, 9 aa, Human cytomegalovirus
QYILGADPL

SEQ ID NO: 2741 - protein, 10 aa, Human cytomegalovirus
ETPVTKATTF

SEQ ID NO: 2742 - protein, 10 aa, Human cytomegalovirus
DVSKGAANKL

SEQ ID NO: 2743 - protein, 10 aa, Human cytomegalovirus
ELAEESLKTF

SEQ ID NO: 2744 - protein, 10 aa, Human cytomegalovirus
EVISVMKRRI

SEQ ID NO: 2745 - protein, 9 aa, Human cytomegalovirus
EVNSQLSLG

SEQ ID NO: 2746 - protein, 11 aa, Human cytomegalovirus
EAIVAYTLATR

SEQ ID NO: 2747 - protein, 11 aa, Human cytomegalovirus
EIMAYAQKIFK

SEQ ID NO: 2748 - protein, 9 aa, Human cytomegalovirus
ETSVMLAKR

SEQ ID NO: 2749 - protein, 9 aa, Human cytomegalovirus
DVSKGAANK

SEQ ID NO: 2750 - protein, 9 aa, Human cytomegalovirus
EVISVMKRR

SEQ ID NO: 2751 - protein, 10 aa, Human cytomegalovirus
TPVTKATTFL

SEQ ID NO: 2752 - protein, 10 aa, Human cytomegalovirus
NPEKDVLAEL

SEQ ID NO: 2753 - protein, 9 aa, Human cytomegalovirus
SPVPATIPL

SEQ ID NO: 2754 - protein, 9 aa, Human cytomegalovirus
VPRPETPVT

SEQ ID NO: 2755 - protein, 9 aa, Human cytomegalovirus
RPETPVTKA

SEQ ID NO: 2756 - protein, 9 aa, Human cytomegalovirus
KARAKKDEL

SEQ ID NO: 2757 - protein, 9 aa, Human cytomegalovirus
VMKRRIEEI

SEQ ID NO: 2758 - protein, 9 aa, Human cytomegalovirus
SAKRKMDPD

SEQ ID NO: 2759 - protein, 9 aa, Human cytomegalovirus
RHRIKEHML

SEQ ID NO: 2760 - protein, 8 aa, Human cytomegalovirus
ENPEKDVL

SEQ ID NO: 2761 - protein, 10 aa, Human cytomegalovirus
ELAEESLKTF

SEQ ID NO: 2762 - protein, 10 aa, Human cytomegalovirus
SQLSLGDPLF

SEQ ID NO: 2763 - protein, 10 aa, Human cytomegalovirus
KVLTHIDHIF

SEQ ID NO: 2764 - protein, 9 aa, Human cytomegalovirus
VLTHIDHIF

SEQ ID NO: 2765 - protein, 9 aa, Human cytomegalovirus
ILDKVHEPF

SEQ ID NO: 2766 - protein, 9 aa, Human cytomegalovirus
DEEEAIVAY

SEQ ID NO: 2767 - protein, 9 aa, Human cytomegalovirus
DELRRKMMY

SEQ ID NO: 2768 - protein, 8 aa, Human cytomegalovirus
EEMKCIGL

SEQ ID NO: 2769 - protein, 8 aa, Human cytomegalovirus
EEKFTGAF

SEQ ID NO: 2770 - protein, 8 aa, Human cytomegalovirus
DEERDKVL

SEQ ID NO: 2771 - protein, 10 aa, Human cytomegalovirus
HRIKEHMLKK

SEQ ID NO: 2772 - protein, 10 aa, Human cytomegalovirus
ARAKKDELRR

SEQ ID NO: 2773 - protein, 9 aa, Human cytomegalovirus
RRIEEICMK

SEQ ID NO: 2774 - protein, 9 aa, Human cytomegalovirus
LRKEVNSQL

SEQ ID NO: 2775 - protein, 9 aa, Human cytomegalovirus
CRVLSCYVL

SEQ ID NO: 2776 - protein, 10 aa, Human cytomegalovirus
NPEKDVLAEL

SEQ ID NO: 2777 - protein, 10 aa, Human cytomegalovirus
TPVTKATTFL

SEQ ID NO: 2778 - protein, 10 aa, Human cytomegalovirus
VPEDKREMWM

SEQ ID NO: 2779 - protein, 9 aa, Human cytomegalovirus
FPELAEESL

SEQ ID NO: 2780 - protein, 9 aa, Human cytomegalovirus
SPVPATIPL

SEQ ID NO: 2781 - protein, 9 aa, Human cytomegalovirus
KATTFLQTM

SEQ ID NO: 2782 - protein, 10 aa, Human cytomegalovirus
KTTNGCSQAM

SEQ ID NO: 2783 - protein, 10 aa, Human cytomegalovirus
TSVMLAKRPL

SEQ ID NO: 2784 - protein, 9 aa, Human cytomegalovirus
KARAKKDEL

SEQ ID NO: 2785 - protein, 9 aa, Human cytomegalovirus
KVLTHIDHI

SEQ ID NO: 2786 - protein, 15 aa, Human cytomegalovirus
DHIFMDILTTCVETM

SEQ ID NO: 2787 - protein, 15 aa, Human cytomegalovirus
DACMMTMYGGISLLS

SEQ ID NO: 2788 - protein, 15 aa, Human cytomegalovirus
LSEFCRVLSCYVLEE

SEQ ID NO: 2789 - protein, 15 aa, Human cytomegalovirus
VFAQYILGADPLRVC

SEQ ID NO: 2790 - protein, 15 aa, Human cytomegalovirus
TGAFNMMGGCLQNAL

SEQ ID NO: 2791 - protein, 15 aa, Human cytomegalovirus
FERVTEDCNENPEKD

SEQ ID NO: 2792 - protein, 15 aa, Human cytomegalovirus
NYIVPEDKREMWMAC

SEQ ID NO: 2793 - protein, 15 aa, Human cytomegalovirus
FNMMGGCLQNALDIL

SEQ ID NO: 2794 - protein, 15 aa, Human cytomegalovirus
QTMLRKEVNSQLSLG

SEQ ID NO: 2795 - protein, 15 aa, Human cytomegalovirus
MKCIGLTMQSMYENY

SEQ ID NO: 2796 - protein, 15 aa, Human cytomegalovirus
DHIFMDILTTCVETM

SEQ ID NO: 2797 - protein, 15 aa, Human cytomegalovirus
LSEFCRVLSCYVLEE

SEQ ID NO: 2798 - protein, 15 aa, Human cytomegalovirus
LSCYVLEETSVMLAK

SEQ ID NO: 2799 - protein, 15 aa, Human cytomegalovirus
IVAYTLATRGASSSD

SEQ ID NO: 2800 - protein, 15 aa, Human cytomegalovirus
ETPVTKATTFLQTML

SEQ ID NO: 2801 - protein, 15 aa, Human cytomegalovirus
DHIFMDILTTCVETM

SEQ ID NO: 2802 - protein, 15 aa, Human cytomegalovirus
CNEYKVTSDACMMTM

SEQ ID NO: 2803 - protein, 15 aa, Human cytomegalovirus
LSEFCRVLSCYVLEE

SEQ ID NO: 2804 - protein, 15 aa, Human cytomegalovirus
LSCYVLEETSVMLAK

SEQ ID NO: 2805 - protein, 15 aa, Human cytomegalovirus
DPLFPELAEESLKTF

SEQ ID NO: 2806 - protein, 15 aa, Human cytomegalovirus
IKELHDVSKGAANKL

SEQ ID NO: 2807 - protein, 15 aa, Human cytomegalovirus
IVAYTLATRGASSSD

SEQ ID NO: 2808 - protein, 15 aa, Human cytomegalovirus
KDVLAELVKQIKVRV

SEQ ID NO: 2809 - protein, 15 aa, Human cytomegalovirus
KPEVISVMKRRIEEI

SEQ ID NO: 2810 - protein, 15 aa, Human cytomegalovirus
PEVISVMKRRIEEIC

SEQ ID NO: 2811 - protein, 15 aa, Human cytomegalovirus
ACMMTMYGGISLLSE

SEQ ID NO: 2812 - protein, 15 aa, Human cytomegalovirus
ISLLSEFCRVLSCYV

SEQ ID NO: 2813 - protein, 15 aa, Human cytomegalovirus
EESLKTFERVTEDCN

SEQ ID NO: 2814 - protein, 15 aa, Human cytomegalovirus
ETPVTKATTFLQTML

SEQ ID NO: 2815 - protein, 15 aa, Human cytomegalovirus
NSQLSLGDPLFPELA

SEQ ID NO: 2816 - protein, 968 aa, Human adenovirus 2
MATPSMMPQWSYMHISGQDASEYLSPGLVQFARATETYFSLNNKFRNPTVAPTHDVTTDRSQRLTLRFIPVDREDTAYSYKARFTLAVGDNRVLDMASTYFDIRGVLDRGPTFKPYSGTAYNALAPKGAPNSCEWEQTEDSGRAVAEDEEEEDEDEEEEEEEQNARDQATKKTHVYAQAPLSGETITKSGLQIGSDNAETQAKPVYADPSYQPEPQIGESQWNEADANAAGGRVLKKTTPMKPCYGSYARPTNPFGGQSVLVPDEKGVPLPKVDLQFFSNTTSLNDRQGNATKPKVVLYSEDVNMETPDTHLSYKPGKGDENSKAMLGQQSMPNRPNYIAFRDNFIGLMYYNSTGNMGVLAGQASQLNAVVDLQDRNTELSYQLLLDSIGDRTRYFSMWNQAVDSYDPDVRIIENHGTEDELPNYCFPLGGIGVTDTYQAIKANGNGSGDNGDTTWTKDETFATRNEIGVGNNFAMEINLNANLWRNFLYSNIALYLPDKLKYNPTNVEISDNPNTYDYMNKRVVAPGLVDCYINLGARWSLDYMDNVNPFNHHRNAGLRYRSMLLGNGRYVPFHIQVPQKFFAIKNLLLLPGSYTYEWNFRKDVNMVLQSSLGNDLRVDGASIKFDSICLYATFFPMAHNTASTLEAMLRNDTNDQSFNDYLSAANMLYPIPANATNVPISIPSRNWAAFRGWAFTRLKTKETPSLGSGYDPYYTYSGSIPYLDGTFYLNHTFKKVAITFDSSVSWPGNDRLLTPNEFEIKRSVDGEGYNVAQCNMTKDWFLVQMLANYNIGYQGFYIPESYKDRMYSFFRNFQPMSRQVVDDTKYKEYQQVGILHQHNNSGFVGYLAPTMREGQAYPANVPYPLIGKTAVDSITQKKFLCDRTLWRIPFSSNFMSMGALTDLGQNLLYANSAHALDMTFEVDPMDEPTLLYVLFEVFDVVRVHQPHRGVIETVYLRTPFSAGNATT

SEQ ID NO: 2817 - protein, 11 aa, Human adenovirus 2
LLDSIGDRTRY

SEQ ID NO: 2818 - protein, 10 aa, Human adenovirus 2
ISDNPNTYDY

SEQ ID NO: 2819 - protein, 9 aa, Human adenovirus 2
PMDEPTLLY

SEQ ID NO: 2820 - protein, 10 aa, Human adenovirus 2
LQDRNTELSY

SEQ ID NO: 2821 - protein, 9 aa, Human adenovirus 2
GTEDELPNY

SEQ ID NO: 2822 - protein, 10 aa, Human adenovirus 2
LLYANSAHAL

SEQ ID NO: 2823 - protein, 9 aa, Human adenovirus 2
TLLYVLFEV

SEQ ID NO: 2824 - protein, 9 aa, Human adenovirus 2
TLAVGDNRV

SEQ ID NO: 2825 - protein, 9 aa, Human adenovirus 2
VLAGQASQL

SEQ ID NO: 2826 - protein, 9 aa, Human adenovirus 2
MLLGNGRYV

SEQ ID NO: 2827 - protein, 10 aa, Human adenovirus 2
DLRVDGASIK

SEQ ID NO: 2828 - protein, 10 aa, Human adenovirus 2
RVLKKTTPMK

SEQ ID NO: 2829 - protein, 9 aa, Human adenovirus 2
RVLDMASTY

SEQ ID NO: 2830 - protein, 9 aa, Human adenovirus 2
ALYLPDKLK

SEQ ID NO: 2831 - protein, 9 aa, Human adenovirus 2
VLDRGPTFK

SEQ ID NO: 2832 - protein, 10 aa, Human adenovirus 2
GVLDRGPTFK

SEQ ID NO: 2833 - protein, 10 aa, Human adenovirus 2
GVTDTYQAIK

SEQ ID NO: 2834 - protein, 9 aa, Human adenovirus 2
GVIETVYLR

SEQ ID NO: 2835 - protein, 9 aa, Human adenovirus 2
ASTLEAMLR

SEQ ID NO: 2836 - protein, 9 aa, Human adenovirus 2
NVPYPLIGK

SEQ ID NO: 2837 - protein, 10 aa, Human adenovirus 2
AYPANVPYPL

SEQ ID NO: 2838 - protein, 10 aa, Human adenovirus 2
EYLSPGLVQF

SEQ ID NO: 2839 - protein, 9 aa, Human adenovirus 2
PYLDGTFYL

SEQ ID NO: 2840 - protein, 9 aa, Human adenovirus 2
TYFSLNNKF

SEQ ID NO: 2841 - protein, 9 aa, Human adenovirus 2
TYFDIRGVL

SEQ ID NO: 2842 - protein, 10 aa, Human adenovirus 2
EVDPMDEPTL

SEQ ID NO: 2843 - protein, 9 aa, Human adenovirus 2
ETPSLGSGY

SEQ ID NO: 2844 - protein, 9 aa, Human adenovirus 2
ETPDTHLSY

SEQ ID NO: 2845 - protein, 9 aa, Human adenovirus 2
ETVYLRTPF

SEQ ID NO: 2846 - protein, 9 aa, Human adenovirus 2
EVFDVVRVH

SEQ ID NO: 2847 - protein, 9 aa, Human adenovirus 2
TAVDSITQK

SEQ ID NO: 2848 - protein, 9 aa, Human adenovirus 2
ETYFSLNNK

SEQ ID NO: 2849 - protein, 9 aa, Human adenovirus 2
NVPYPLIGK

SEQ ID NO: 2850 - protein, 10 aa, Human adenovirus 2
LTPNEFEIKR

SEQ ID NO: 2851 - protein, 10 aa, Human adenovirus 2
DVVRVHQPHR

SEQ ID NO: 2852 - protein, 10 aa, Human adenovirus 2
IPYLDGTFYL

SEQ ID NO: 2853 - protein, 9 aa, Human adenovirus 2
VPDEKGVPL

SEQ ID NO: 2854 - protein, 9 aa, Human adenovirus 2
NPFGGQSVL

SEQ ID NO: 2855 - protein, 9 aa, Human adenovirus 2
YPANVPYPL

SEQ ID NO: 2856 - protein, 9 aa, Human adenovirus 2
DPMDEPTLL

SEQ ID NO: 2857 - protein, 9 aa, Human adenovirus 2
GLRYRSMLL

SEQ ID NO: 2858 - protein, 9 aa, Human adenovirus 2
VPDEKGVPL

SEQ ID NO: 2859 - protein, 8 aa, Human adenovirus 2
GLRYRSML

SEQ ID NO: 2860 - protein, 8 aa, Human adenovirus 2
SYKARFTL

SEQ ID NO: 2861 - protein, 8 aa, Human adenovirus 2
ATKPKVVL

SEQ ID NO: 2862 - protein, 10 aa, Human adenovirus 2
LLLLPGSYTY

SEQ ID NO: 2863 - protein, 10 aa, Human adenovirus 2
YQGFYIPESY

SEQ ID NO: 2864 - protein, 10 aa, Human adenovirus 2
VQFARATETY

SEQ ID NO: 2865 - protein, 10 aa, Human adenovirus 2
ALYLPDKLKY

SEQ ID NO: 2866 - protein, 9 aa, Human adenovirus 2
RQVVDDTKY

SEQ ID NO: 2867 - protein, 9 aa, Human adenovirus 2
DEPTLLYVL

SEQ ID NO: 2868 - protein, 9 aa, Human adenovirus 2
AETQAKPVY

SEQ ID NO: 2869 - protein, 8 aa, Human adenovirus 2
DELPNYCF

SEQ ID NO: 2870 - protein, 8 aa, Human adenovirus 2
DENSKAML

SEQ ID NO: 2871 - protein, 8 aa, Human adenovirus 2
TEDELPNY

SEQ ID NO: 2872 - protein, 10 aa, Human adenovirus 2
DRSQRLTLRF

SEQ ID NO: 2873 - protein, 10 aa, Human adenovirus 2
GRVLKKTTPM

SEQ ID NO: 2874 - protein, 10 aa, Human adenovirus 2
LRVDGASIKF

SEQ ID NO: 2875 - protein, 9 aa, Human adenovirus 2
WRIPFSSNF

SEQ ID NO: 2876 - protein, 9 aa, Human adenovirus 2
DRLLTPNEF

SEQ ID NO: 2877 - protein, 10 aa, Human adenovirus 2
IPVDREDTAY

SEQ ID NO: 2878 - protein, 10 aa, Human adenovirus 2
MPNRPNYIAF

SEQ ID NO: 2879 - protein, 10 aa, Human adenovirus 2
IPESYKDRMY

SEQ ID NO: 2880 - protein, 10 aa, Human adenovirus 2
DPMDEPTLLY

SEQ ID NO: 2881 - protein, 9 aa, Human adenovirus 2
VPDEKGVPL

SEQ ID NO: 2882 - protein, 10 aa, Human adenovirus 2
RSQRLTLRFI

SEQ ID NO: 2883 - protein, 10 aa, Human adenovirus 2
VSWPGNDRLL

SEQ ID NO: 2884 - protein, 10 aa, Human adenovirus 2
DSIGDRTRYF

SEQ ID NO: 2885 - protein, 10 aa, Human adenovirus 2
DSYDPDVRII

SEQ ID NO: 2886 - protein, 9 aa, Human adenovirus 2
KTTPMKPCY

SEQ ID NO: 2887 - protein, 15 aa, Human adenovirus 2
GTAYNALAPKGAPNS

SEQ ID NO: 2888 - protein, 15 aa, Human adenovirus 2
VDCYINLGARWSLDY

SEQ ID NO: 2889 - protein, 15 aa, Human adenovirus 2
YVPFHIQVPQKFFAI

SEQ ID NO: 2890 - protein, 15 aa, Human adenovirus 2
QWSYMHISGQDASEY

SEQ ID NO: 2891 - protein, 15 aa, Human adenovirus 2
TGNMGVLAGQASQLN

SEQ ID NO: 2892 - protein, 15 aa, Human adenovirus 2
EWNFRKDVNMVLQSS

SEQ ID NO: 2893 - protein, 15 aa, Human adenovirus 2
GASIKFDSICLYATF

SEQ ID NO: 2894 - protein, 15 aa, Human adenovirus 2
THDVTTDRSQRLTLR

SEQ ID NO: 2895 - protein, 15 aa, Human adenovirus 2
QSVLVPDEKGVPLPK

SEQ ID NO: 2896 - protein, 15 aa, Human adenovirus 2
GRAVAEDEEEEDEDE

SEQ ID NO: 2897 - protein, 15 aa, Human adenovirus 2
TLRFIPVDREDTAYS

SEQ ID NO: 2898 - protein, 15 aa, Human adenovirus 2
VVLYSEDVNMETPDT

SEQ ID NO: 2899 - protein, 15 aa, Human adenovirus 2
DTTWTKDETFATRNE

SEQ ID NO: 2900 - protein, 15 aa, Human adenovirus 2
GNNFAMEINLNANLW

SEQ ID NO: 2901 - protein, 15 aa, Human adenovirus 2
PQKFFAIKNLLLLPG

SEQ ID NO: 2902 - protein, 15 aa, Human adenovirus 2
LMYYNSTGNMGVLAG

SEQ ID NO: 2903 - protein, 15 aa, Human adenovirus 2
PQKFFAIKNLLLLPG

SEQ ID NO: 2904 - protein, 15 aa, Human adenovirus 2
DPYYTYSGSIPYLDG

SEQ ID NO: 2905 - protein, 15 aa, Human adenovirus 2
FKKVAITFDSSVSWP

SEQ ID NO: 2906 - protein, 15 aa, Human adenovirus 2
LVQFARATETYFSLN

SEQ ID NO: 2907 - protein, 15 aa, Human adenovirus 2
YATFFPMAHNTASTL

SEQ ID NO: 2908 - protein, 15 aa, Human adenovirus 2
PNTYDYMNKRVVAPG

SEQ ID NO: 2909 - protein, 15 aa, Human adenovirus 2
FRNFQPMSRQVVDDT

SEQ ID NO: 2910 - protein, 15 aa, Human adenovirus 2
TLRFIPVDREDTAYS

SEQ ID NO: 2911 - protein, 15 aa, Human adenovirus 2
NVPYPLIGKTAVDSI

SEQ ID NO: 2912 - protein, 15 aa, Human adenovirus 2
PGLVDCYINLGARWS

SEQ ID NO: 2913 - protein, 15 aa, Human adenovirus 2
FDSICLYATFFPMAH

SEQ ID NO: 2914 - protein, 15 aa, Human adenovirus 2
YSFFRNFQPMSRQVV

SEQ ID NO: 2915 - protein, 15 aa, Human adenovirus 2
PSMMPQWSYMHISGQ

SEQ ID NO: 2916 - protein, 15 aa, Human adenovirus 2
KVDLQFFSNTTSLND

SEQ ID NO: 2917 - protein, 571 aa, Human adenovirus 2
MQRAAMYEEGPPPSYESVVSAAPVAAALGSPFDAPLDPPFVPPRYLRPTGGRNSIRYSELAPLFDTTRVYLVDNKSTDVASLNYQNDHSNFLTTVIQNNDYSPGEASTQTINLDDRSHWGGDLKTILHTNMPNVNEFMFTNKFKARVMVSRSLTKDKQVELKYEWVEFTLPEGNYSETMTIDLMNNAIVEHYLKVGRQNGVLESDIGVKFDTRNFRLGFDPVTGLVMPGVYTNEAFHPDIILLPGCGVDFTHSRLSNLLGIRKRQPFQEGFRITYDDLEGGNIPALLDVDAYQASLKDDTEQGGDGAGGGNNSGSGAEENSNAAAAAMQPVEDMNDHAIRGDTFATRAEEKRAEAEAAAEAAAPAAQPEVEKPQKKPVIKPLTEDSKKRSYNLISNDSTFTQYRSWYLAYNYGDPQTGIRSWTLLCTPDVTCGSEQVYWSLPDMMQDPVTFRSTSQISNFPVVGAELLPVHSKSFYNDQAVYSQLIRQFTSLTHVFNRFPENQILARPPAPTITTVSENVPALTDHGTLPLRNSIGGVQRVTITDARRRTCPYVYKALGIVSPRVLSSRTF

SEQ ID NO: 2918 - protein, 11 aa, Human adenovirus 2
ITDARRRTCPY

SEQ ID NO: 2919 - protein, 11 aa, Human adenovirus 2
PLDPPFVPPRY

SEQ ID NO: 2920 - protein, 9 aa, Human adenovirus 2
STDVASLNY

SEQ ID NO: 2921 - protein, 10 aa, Human adenovirus 2
TKDKQVELKY

SEQ ID NO: 2922 - protein, 10 aa, Human adenovirus 2
LTEDSKKRSY

SEQ ID NO: 2923 - protein, 10 aa, Human adenovirus 2
DLEGGNIPAL

SEQ ID NO: 2924 - protein, 10 aa, Human adenovirus 2
SIRYSELAPL

SEQ ID NO: 2925 - protein, 10 aa, Human adenovirus 2
SLTKDKQVEL

SEQ ID NO: 2926 - protein, 10 aa, Human adenovirus 2
ILARPPAPTI

SEQ ID NO: 2927 - protein, 9 aa, Human adenovirus 2
AIVEHYLKV

SEQ ID NO: 2928 - protein, 10 aa, Human adenovirus 2
RVMVSRSLTK

SEQ ID NO: 2929 - protein, 10 aa, Human adenovirus 2
GVLESDIGVK

SEQ ID NO: 2930 - protein, 10 aa, Human adenovirus 2
ILLPGCGVDF

SEQ ID NO: 2931 - protein, 10 aa, Human adenovirus 2
RLSNLLGIRK

SEQ ID NO: 2932 - protein, 10 aa, Human adenovirus 2
DVDAYQASLK

SEQ ID NO: 2933 - protein, 10 aa, Human adenovirus 2
GVLESDIGVK

SEQ ID NO: 2934 - protein, 10 aa, Human adenovirus 2
RVMVSRSLTK

SEQ ID NO: 2935 - protein, 10 aa, Human adenovirus 2
LTKDKQVELK

SEQ ID NO: 2936 - protein, 10 aa, Human adenovirus 2
DVDAYQASLK

SEQ ID NO: 2937 - protein, 10 aa, Human adenovirus 2
DTFATRAEEK

SEQ ID NO: 2938 - protein, 10 aa, Human adenovirus 2
NYSETMTIDL

SEQ ID NO: 2939 - protein, 10 aa, Human adenovirus 2
TYDDLEGGNI

SEQ ID NO: 2940 - protein, 9 aa, Human adenovirus 2
RYSELAPLF

SEQ ID NO: 2941 - protein, 9 aa, Human adenovirus 2
KYEWVEFTL

SEQ ID NO: 2942 - protein, 9 aa, Human adenovirus 2
VYSQLIRQF

SEQ ID NO: 2943 - protein, 10 aa, Human adenovirus 2
DVTCGSEQVY

SEQ ID NO: 2944 - protein, 10 aa, Human adenovirus 2
EAFHPDIILL

SEQ ID NO: 2945 - protein, 10 aa, Human adenovirus 2
TTVSENVPAL

SEQ ID NO: 2946 - protein, 9 aa, Human adenovirus 2
DVDAYQASL

SEQ ID NO: 2947 - protein, 9 aa, Human adenovirus 2
TVSENVPAL

SEQ ID NO: 2948 - protein, 11 aa, Human adenovirus 2
DTFATRAEEKR

SEQ ID NO: 2949 - protein, 11 aa, Human adenovirus 2
PVEDMNDHAIR

SEQ ID NO: 2950 - protein, 10 aa, Human adenovirus 2
ELAPLFDTTR

SEQ ID NO: 2951 - protein, 10 aa, Human adenovirus 2
IVEHYLKVGR

SEQ ID NO: 2952 - protein, 9 aa, Human adenovirus 2
RVTITDARR

SEQ ID NO: 2953 - protein, 10 aa, Human adenovirus 2
PPSYESVVSA

SEQ ID NO: 2954 - protein, 10 aa, Human adenovirus 2
VPALTDHGTL

SEQ ID NO: 2955 - protein, 10 aa, Human adenovirus 2
DPPFVPPRYL

SEQ ID NO: 2956 - protein, 9 aa, Human adenovirus 2
PPFVPPRYL

SEQ ID NO: 2957 - protein, 9 aa, Human adenovirus 2
RPPAPTITT

SEQ ID NO: 2958 - protein, 9 aa, Human adenovirus 2
LTKDKQVEL

SEQ ID NO: 2959 - protein, 9 aa, Human adenovirus 2
DSKKRSYNL

SEQ ID NO: 2960 - protein, 9 aa, Human adenovirus 2
ELKYEWVEF

SEQ ID NO: 2961 - protein, 9 aa, Human adenovirus 2
QKKPVIKPL

SEQ ID NO: 2962 - protein, 8 aa, Human adenovirus 2
GIRKRQPF

SEQ ID NO: 2963 - protein, 10 aa, Human adenovirus 2
ILLPGCGVDF

SEQ ID NO: 2964 - protein, 10 aa, Human adenovirus 2
RQFTSLTHVF

SEQ ID NO: 2965 - protein, 10 aa, Human adenovirus 2
TQYRSWYLAY

SEQ ID NO: 2966 - protein, 10 aa, Human adenovirus 2
VLESDIGVKF

SEQ ID NO: 2967 - protein, 9 aa, Human adenovirus 2
PLFDTTRVY

SEQ ID NO: 2968 - protein, 9 aa, Human adenovirus 2
NEFMFTNKF

SEQ ID NO: 2969 - protein, 9 aa, Human adenovirus 2
LESDIGVKF

SEQ ID NO: 2970 - protein, 9 aa, Human adenovirus 2
TEDSKKRSY

SEQ ID NO: 2971 - protein, 8 aa, Human adenovirus 2
EEGPPPSY

SEQ ID NO: 2972 - protein, 8 aa, Human adenovirus 2
QEGFRITY

SEQ ID NO: 2973 - protein, 10 aa, Human adenovirus 2
FRSTSQISNF

SEQ ID NO: 2974 - protein, 10 aa, Human adenovirus 2
GRNSIRYSEL

SEQ ID NO: 2975 - protein, 10 aa, Human adenovirus 2
IRYSELAPLF

SEQ ID NO: 2976 - protein, 10 aa, Human adenovirus 2
QRVTITDARR

SEQ ID NO: 2977 - protein, 9 aa, Human adenovirus 2
RRTCPYVYK

SEQ ID NO: 2978 - protein, 10 aa, Human adenovirus 2
APLFDTTRVY

SEQ ID NO: 2979 - protein, 10 aa, Human adenovirus 2
IPALLDVDAY

SEQ ID NO: 2980 - protein, 10 aa, Human adenovirus 2
VPALTDHGTL

SEQ ID NO: 2981 - protein, 9 aa, Human adenovirus 2
FPVVGAELL

SEQ ID NO: 2982 - protein, 9 aa, Human adenovirus 2
LPVHSKSFY

SEQ ID NO: 2983 - protein, 10 aa, Human adenovirus 2
KARVMVSRSL

SEQ ID NO: 2984 - protein, 10 aa, Human adenovirus 2
KSTDVASLNY

SEQ ID NO: 2985 - protein, 10 aa, Human adenovirus 2
KSFYNDQAVY

SEQ ID NO: 2986 - protein, 9 aa, Human adenovirus 2
RSWYLAYNY

SEQ ID NO: 2987 - protein, 9 aa, Human adenovirus 2
RSTSQISNF

SEQ ID NO: 2988 - protein, 15 aa, Human adenovirus 2
HPDIILLPGCGVDFT

SEQ ID NO: 2989 - protein, 15 aa, Human adenovirus 2
RITYDDLEGGNIPAL

SEQ ID NO: 2990 - protein, 15 aa, Human adenovirus 2
IRSWTLLCTPDVTCG

SEQ ID NO: 2991 - protein, 15 aa, Human adenovirus 2
ISNFPVVGAELLPVH

SEQ ID NO: 2992 - protein, 15 aa, Human adenovirus 2
RLGFDPVTGLVMPGV

SEQ ID NO: 2993 - protein, 15 aa, Human adenovirus 2
SRSLTKDKQVELKYE

SEQ ID NO: 2994 - protein, 15 aa, Human adenovirus 2
NGVLESDIGVKFDTR

SEQ ID NO: 2995 - protein, 15 aa, Human adenovirus 2
NFRLGFDPVTGLVMP

SEQ ID NO: 2996 - protein, 15 aa, Human adenovirus 2
IKPLTEDSKKRSYNL

SEQ ID NO: 2997 - protein, 15 aa, Human adenovirus 2
DIGVKFDTRNFRLGF

SEQ ID NO: 2998 - protein, 15 aa, Human adenovirus 2
SLNYQNDHSNFLTTV

SEQ ID NO: 2999 - protein, 15 aa, Human adenovirus 2
KRSYNLISNDSTFTQ

SEQ ID NO: 3000 - protein, 15 aa, Human adenovirus 2
IRSWTLLCTPDVTCG

SEQ ID NO: 3001 - protein, 15 aa, Human adenovirus 2
QAVYSQLIRQFTSLT

SEQ ID NO: 3002 - protein, 15 aa, Human adenovirus 2
IRQFTSLTHVFNRFP

SEQ ID NO: 3003 - protein, 15 aa, Human adenovirus 2
EGNYSETMTIDLMNN

SEQ ID NO: 3004 - protein, 15 aa, Human adenovirus 2
APLFDTTRVYLVDNK

SEQ ID NO: 3005 - protein, 15 aa, Human adenovirus 2
SLNYQNDHSNFLTTV

SEQ ID NO: 3006 - protein, 15 aa, Human adenovirus 2
DSTFTQYRSWYLAYN

SEQ ID NO: 3007 - protein, 15 aa, Human adenovirus 2
IRSWTLLCTPDVTCG

SEQ ID NO: 3008 - protein, 15 aa, Human adenovirus 2
VEHYLKVGRQNGVLE

SEQ ID NO: 3009 - protein, 15 aa, Human adenovirus 2
LSNLLGIRKRQPFQE

SEQ ID NO: 3010 - protein, 15 aa, Human adenovirus 2
IRQFTSLTHVFNRFP

SEQ ID NO: 3011 - protein, 15 aa, Human adenovirus 2
VNEFMFTNKFKARVM

SEQ ID NO: 3012 - protein, 15 aa, Human adenovirus 2
PPSYESVVSAAPVAA

SEQ ID NO: 3013 - protein, 15 aa, Human adenovirus 2
SQLIRQFTSLTHVFN

SEQ ID NO: 3014 - protein, 15 aa, Human adenovirus 2
NAIVEHYLKVGRQNG

SEQ ID NO: 3015 - protein, 15 aa, Human adenovirus 2
QTGIRSWTLLCTPDV

SEQ ID NO: 3016 - protein, 15 aa, Human adenovirus 2
TSQISNFPVVGAELL

SEQ ID NO: 3017 - protein, 15 aa, Human adenovirus 2
LLDVDAYQASLKDDT

SEQ ID NO: 3018 - protein, 695 aa, Human polyomavirus 1
MDKVLNREESMELMDLLGLERAAWGNLPLMRKAYLRKCKEFHPDKGGDEDKMKRMNTLYKKMEQDVKVAHQPDFGTWSSSEVPTYGTEEWESWWSSFNEKWDEDLFCHEDMFASDEEATADSQHSTPPKKKRKVEDPKDFPSDLHQFLSQAVFSNRTLACFAVYTTKEKAQILYKKLMEKYSVTFISRHMCAGHNIIFFLTPHRHRVSAINNFCQKLCTFSFLICKGVNKEYLLYSALTRDPYHTIEESIQGGLKEHDFSPEEPEETKQVSWKLITEYAVETKCEDVFLLLGMYLEFQYNVEECKKCQKKDQPYHFKYHEKHFANAIIFAESKNQKSICQQAVDTVLAKKRVDTLHMTREEMLTERFNHILDKMDLIFGAHGNAVLEQYMAGVAWLHCLLPKMDSVIFDFLHCIVFNVPKRRYWLFKGPIDSGKTTLAAGLLDLCGGKALNVNLPMERLTFELGVAIDQYMVVFEDVKGTGAESKDLPSGHGINNLDSLRDYLDGSVKVNLEKKHLNKRTQIFPPGLVTMNEYPVPKTLQARFVRQIDFRPKIYLRKSLQNSEFLLEKRILQSGMTLLLLLIWFRPVADFATDIQSRIVEWKERLDSEISMYTFSRMKYNICMGKCILDITREEDSETEDSGHGSSTESQSQCSSQVSDTSAPAEDSQRSDPHSQELHLCKGFQCFKRPKTPPPK

SEQ ID NO: 3019 - protein, 11 aa, Human polyomavirus 1
CEDVFLLLGMY

SEQ ID NO: 3020 - protein, 11 aa, Human polyomavirus 1
YTTKEKAQILY

SEQ ID NO: 3021 - protein, 10 aa, Human polyomavirus 1
KKDQPYHFKY

SEQ ID NO: 3022 - protein, 9 aa, Human polyomavirus 1
RLDSEISMY

SEQ ID NO: 3023 - protein, 9 aa, Human polyomavirus 1
QIDFRPKIY

SEQ ID NO: 3024 - protein, 10 aa, Human polyomavirus 1
VLAKKRVDTL

SEQ ID NO: 3025 - protein, 10 aa, Human polyomavirus 1
SICQQAVDTV

SEQ ID NO: 3026 - protein, 10 aa, Human polyomavirus 1
YLDGSVKVNL

SEQ ID NO: 3027 - protein, 9 aa, Human polyomavirus 1
TLAAGLLDL

SEQ ID NO: 3028 - protein, 9 aa, Human polyomavirus 1
CLLPKMDSV

SEQ ID NO: 3029 - protein, 9 aa, Human polyomavirus 1
DVGTGAESK

SEQ ID NO: 3030 - protein, 9 aa, Human polyomavirus 1
FLICKGVNK

SEQ ID NO: 3031 - protein, 9 aa, Human polyomavirus 1
RDYLDGSVK

SEQ ID NO: 3032 - protein, 9 aa, Human polyomavirus 1
ILYKKLMEK

SEQ ID NO: 3033 - protein, 9 aa, Human polyomavirus 1
AVDTVLAKK

SEQ ID NO: 3034 - protein, 10 aa, Human polyomavirus 1
VTMNEYPVPK

SEQ ID NO: 3035 - protein, 9 aa, Human polyomavirus 1
GSVKVNLEK

SEQ ID NO: 3036 - protein, 9 aa, Human polyomavirus 1
CTFSFLICK

SEQ ID NO: 3037 - protein, 9 aa, Human polyomavirus 1
STPPKKKRK

SEQ ID NO: 3038 - protein, 9 aa, Human polyomavirus 1
AVDTVLAKK

SEQ ID NO: 3039 - protein, 10 aa, Human polyomavirus 1
VYTTKEKAQI

SEQ ID NO: 3040 - protein, 10 aa, Human polyomavirus 1
KYNICMGKCI

SEQ ID NO: 3041 - protein, 9 aa, Human polyomavirus 1
AYLRKCKEF

SEQ ID NO: 3042 - protein, 9 aa, Human polyomavirus 1
PYHTIEESI

SEQ ID NO: 3043 - protein, 9 aa, Human polyomavirus 1
QYMAGVAWL

SEQ ID NO: 3044 - protein, 9 aa, Human polyomavirus 1
ELGVAIDQY

SEQ ID NO: 3045 - protein, 10 aa, Human polyomavirus 1
ETKCEDVFLL

SEQ ID NO: 3046 - protein, 10 aa, Human polyomavirus 1
EDVFLLLGMY

SEQ ID NO: 3047 - protein, 9 aa, Human polyomavirus 1
DVFLLLGMY

SEQ ID NO: 3048 - protein, 9 aa, Human polyomavirus 1
ETKQVSWKL

SEQ ID NO: 3049 - protein, 11 aa, Human polyomavirus 1
DTSAPAEDSQR

SEQ ID NO: 3050 - protein, 11 aa, Human polyomavirus 1
LVTMNEYPVPK

SEQ ID NO: 3051 - protein, 9 aa, Human polyomavirus 1
CTFSFLICK

SEQ ID NO: 3052 - protein, 9 aa, Human polyomavirus 1
AVDTVLAKK

SEQ ID NO: 3053 - protein, 9 aa, Human polyomavirus 1
PVPKTLQAR

SEQ ID NO: 3054 - protein, 10 aa, Human polyomavirus 1
LPSGHGINNL

SEQ ID NO: 3055 - protein, 10 aa, Human polyomavirus 1
LPMERLTFEL

SEQ ID NO: 3056 - protein, 10 aa, Human polyomavirus 1
RPKIYLRKSL

SEQ ID NO: 3057 - protein, 10 aa, Human polyomavirus 1
GPIDSGKTTL

SEQ ID NO: 3058 - protein, 9 aa, Human polyomavirus 1
FPSDLHQFL

SEQ ID NO: 3059 - protein, 9 aa, Human polyomavirus 1
LAKKRVDTL

SEQ ID NO: 3060 - protein, 9 aa, Human polyomavirus 1
TTKEKAQIL

SEQ ID NO: 3061 - protein, 8 aa, Human polyomavirus 1
VPKRRYWL

SEQ ID NO: 3062 - protein, 8 aa, Human polyomavirus 1
FLLEKRIL

SEQ ID NO: 3063 - protein, 8 aa, Human polyomavirus 1
PLMRKAYL

SEQ ID NO: 3064 - protein, 10 aa, Human polyomavirus 1
RQIDFRPKIY

SEQ ID NO: 3065 - protein, 10 aa, Human polyomavirus 1
KLMEKYSVTF

SEQ ID NO: 3066 - protein, 10 aa, Human polyomavirus 1
ILYKKLMEKY

SEQ ID NO: 3067 - protein, 10 aa, Human polyomavirus 1
LLGMYLEFQY

SEQ ID NO: 3068 - protein, 9 aa, Human polyomavirus 1
NLPLMRKAY

SEQ ID NO: 3069 - protein, 9 aa, Human polyomavirus 1
REEMLTERF

SEQ ID NO: 3070 - protein, 9 aa, Human polyomavirus 1
QELHLCKGF

SEQ ID NO: 3071 - protein, 9 aa, Human polyomavirus 1
NEKWDEDLF

SEQ ID NO: 3072 - protein, 8 aa, Human polyomavirus 1
EEMLTERF

SEQ ID NO: 3073 - protein, 8 aa, Human polyomavirus 1
MEKYSVTF

SEQ ID NO: 3074 - protein, 10 aa, Human polyomavirus 1
ARFVRQIDFR

SEQ ID NO: 3075 - protein, 10 aa, Human polyomavirus 1
KRILQSGMTL

SEQ ID NO: 3076 - protein, 9 aa, Human polyomavirus 1
HRVSAINNF

SEQ ID NO: 3077 - protein, 9 aa, Human polyomavirus 1
ERFNHILDK

SEQ ID NO: 3078 - protein, 9 aa, Human polyomavirus 1
KRMNTLYKK

SEQ ID NO: 3079 - protein, 10 aa, Human polyomavirus 1
GPIDSGKTTL

SEQ ID NO: 3080 - protein, 10 aa, Human polyomavirus 1
LPMERLTFEL

SEQ ID NO: 3081 - protein, 10 aa, Human polyomavirus 1
LPSGHGINNL

SEQ ID NO: 3082 - protein, 9 aa, Human polyomavirus 1
FPSDLHQFL

SEQ ID NO: 3083 - protein, 9 aa, Human polyomavirus 1
LPLMRKAYL

SEQ ID NO: 3084 - protein, 10 aa, Human polyomavirus 1
KSLQNSEFLL

SEQ ID NO: 3085 - protein, 10 aa, Human polyomavirus 1
KAQILYKKLM

SEQ ID NO: 3086 - protein, 10 aa, Human polyomavirus 1
KAYLRKCKEF

SEQ ID NO: 3087 - protein, 9 aa, Human polyomavirus 1
KTTLAAGLL

SEQ ID NO: 3088 - protein, 9 aa, Human polyomavirus 1
KALNVNLPM

SEQ ID NO: 3089 - protein, 15 aa, Human polyomavirus 1
MVVFEDVKGTGAESK

SEQ ID NO: 3090 - protein, 15 aa, Human polyomavirus 1
CEDVFLLLGMYLEFQ

SEQ ID NO: 3091 - protein, 15 aa, Human polyomavirus 1
AAGLLDLCGGKALNV

SEQ ID NO: 3092 - protein, 15 aa, Human polyomavirus 1
RMKYNICMGKCILDI

SEQ ID NO: 3093 - protein, 15 aa, Human polyomavirus 1
QILYKKLMEKYSVTF

SEQ ID NO: 3094 - protein, 15 aa, Human polyomavirus 1
PKDFPSDLHQFLSQA

SEQ ID NO: 3095 - protein, 15 aa, Human polyomavirus 1
YKKMEQDVKVAHQPD

SEQ ID NO: 3096 - protein, 15 aa, Human polyomavirus 1
EDMFASDEEATADSQ

SEQ ID NO: 3097 - protein, 15 aa, Human polyomavirus 1
YMVVFEDVKGTGAES

SEQ ID NO: 3098 - protein, 15 aa, Human polyomavirus 1
WGNLPLMRKAYLRKC

SEQ ID NO: 3099 - protein, 15 aa, Human polyomavirus 1
PKDFPSDLHQFLSQA

SEQ ID NO: 3100 - protein, 15 aa, Human polyomavirus 1
NSEFLLEKRILQSGM

SEQ ID NO: 3101 - protein, 15 aa, Human polyomavirus 1
VADFATDIQSRIVEW

SEQ ID NO: 3102 - protein, 15 aa, Human polyomavirus 1
CKGFQCFKRPKTPPP

SEQ ID NO: 3103 - protein, 15 aa, Human polyomavirus 1
DKVLNREESMELMDL

SEQ ID NO: 3104 - protein, 15 aa, Human polyomavirus 1
QVSWKLITEYAVETK

SEQ ID NO: 3105 - protein, 15 aa, Human polyomavirus 1
VDTLHMTREEMLTER

SEQ ID NO: 3106 - protein, 15 aa, Human polyomavirus 1
WESWWSSFNEKWDED

SEQ ID NO: 3107 - protein, 15 aa, Human polyomavirus 1
TFELGVAIDQYMVVF

SEQ ID NO: 3108 - protein, 15 aa, Human polyomavirus 1
QPDFGTWSSSEVPTY

SEQ ID NO: 3109 - protein, 15 aa, Human polyomavirus 1
IFFLTPHRHRVSAIN

SEQ ID NO: 3110 - protein, 15 aa, Human polyomavirus 1
YLLYSALTRDPYHTI

SEQ ID NO: 3111 - protein, 15 aa, Human polyomavirus 1
PYHFKYHEKHFANAI

SEQ ID NO: 3112 - protein, 15 aa, Human polyomavirus 1
HCIVFNVPKRRYWLF

SEQ ID NO: 3113 - protein, 15 aa, Human polyomavirus 1
YMVVFEDVKGTGAES

SEQ ID NO: 3114 - protein, 15 aa, Human polyomavirus 1
CQKLCTFSFLICKGV

SEQ ID NO: 3115 - protein, 15 aa, Human polyomavirus 1
DQYMVVFEDVKGTGA

SEQ ID NO: 3116 - protein, 15 aa, Human polyomavirus 1
LLLLIWFRPVADFAT

SEQ ID NO: 3117 - protein, 15 aa, Human polyomavirus 1
PSDLHQFLSQAVFSN

SEQ ID NO: 3118 - protein, 15 aa, Human polyomavirus 1
GHNIIFFLTPHRHRV
